(19) United States
(12) Patent Application Publication
(10) Pub. No.: US 2016/0187319 A1
(43) Pub. Date: Jun. 30, 2016

(54) CELL DEATH-INDUCING AGENT, CELL GROWTH-INHIBITING AGENT, AND PHARMACEUTICAL COMPOSITION FOR TREATMENT OF DISEASE CAUSED BY ABNORMAL CELL GROWTH

(71) Applicant: Nitto Denko Corporation, Osaka (JP)

(72) Inventors: Hiroyuki TANAKA, Osaka (JP); Kenjirou MINOMI, Osaka (JP); Yoshiro NIITSU, Hokkaido (JP)

(21) Appl. No.: 14/793,212

(22) Filed: Jul. 7, 2015

(30) Foreign Application Priority Data
Dec. 26, 2014 (JP) 2014-266198
Jul. 6, 2015 (JP) 2015-135494

(51) Int. Cl. G01N 33/50; A61K 31/713

(52) U.S. Cl. CPC G01N 33/5011; A61K 31/713

(57) ABSTRACT

An agent for inducing cell death and/or inhibiting cell growth for cancer cells. The agents of the present invention comprise, as active ingredients, a drug inhibiting GST-π and a drug inhibiting a homeostasis-related protein that exhibits synthetic lethality when inhibited together with GST-π. The homeostasis-related protein can be a cell cycle-regulating protein or an anti-apoptosis-related protein.

### SEQUENCE LISTING

[0001] This application includes a Sequence Listing submitted herewith via EFS-Web as an ASCII file created on Jul. 6, 2015, named NDT15061573US_SeqList.txt, which is 688,805 bytes in size, and is hereby incorporated by reference in its entirety.

### BACKGROUND ART

[0002] Typical examples of diseases caused by abnormal cell growth can include cancers. Cancers are diseases in which cells grow in an uncontrolled manner due to mutations, epigenetic abnormalities, etc., in genes. A large number of gene abnormalities in cancers have already been reported (e.g., Futreal et al., Nat Rev Cancer. 2004; 4 (3): 177-83), most of which are considered to have some relation to signal transduction involved in cell growth, differentiation, or survival. Moreover, such gene abnormalities cause abnormal signal transduction in cells constituted by normal molecules. This may bring about the activation or deactivation of a particular signal cascade and eventually become partly responsible for the abnormal growth of the cells.

[0003] Although a principal objective of cancer treatment in early times was to inhibit cell growth itself, such treatment physiologically inhibited even the growth of normal cells and therefore involved adverse reactions such as alopecia, gastrointestinal disturbances, and myelosuppression. Accordingly, therapeutic drugs for cancers based on novel ideas such as molecular target drugs, which target cancer-specific gene abnormalities or abnormal signal transduction, are under development in order to prevent such adverse reactions.

[0004] A cancer is thought to occur by the accumulation of abnormalities in various cancer genes, tumor suppressor genes, DNA repair enzyme genes, and the like in the same cell. RAS gene, FOS gene, MYC gene, and BCL-2 gene, etc., are known as the cancer genes. Among cancer-specific gene abnormalities, a mutation is found in KRAS gene in approximately 95% pancreatic cancer, approximately 45% colorectal cancer, and many other cancers with high frequency. The KRAS protein is a G protein that is localized to the inner side of a cell membrane. RAS including KRAS forms a cascade where RAS activates RAF such as C-RAF or B-RAF, and subsequently, this RAF activates MEK, which then activates MAPK. When a point mutation takes place in KRAS, GTPase activity is reduced so that GTP-bound active forms are maintained to thereby constitutively sustain signals to downstream pathway, resulting in abnormal cell growth. As typified by the KRAS gene, the cancer genes cause abnormal cell growth which in turn progresses to the malignant transformation of the cell and eventually a cancer as a disease.

[0005] Incidentally, glutathione-S-transferase (GST), an enzyme catalyzing glutathione conjugation, is known as an enzyme that converts a substance such as a drug to a water-soluble substance through coupling with glutathione (GSH). GST is typically classified, on the basis of amino acid sequences, into 6 types of isozymes: α, μ, ω, π, θ, and ξ. Among them, particularly, the expression of GST-π (glutathione S-transferase pi, also called GSTP1) is increased in various cancer cells. The possibility has been pointed out that this is partly responsible for resistance to some anticancer agents. In fact, it is known that when an antisense DNA against GST-π or a GST-π inhibitor is allowed to act on a GST-π-overexpressing cancer cell line that exhibits drug resistance, the drug resistance is inhibited (Takahashi and Niitsu, Gan To Kagaku Ryoho. 1994; 21 (7): 945-51; Ban et al., Cancer Res. 1996; 56 (15): 3577-82; and Nakajima et al., J Pharmacol Exp Ther. 2003; 306 (3): 861-9). In addition, a recent report has showed that when an siRNA against GST-π is allowed to act on a GST-π-overexpressing androgen-independent prostate cancer cell line, its growth is inhibited so that apoptosis is increased (Hokaiwado et al., Carcinogenesis. 2008; 29 (6): 1134-8).

[0006] It is also known that GST-π forms a complex with c-Jun N-terminal kinase (JNK) to inhibit JNK activity (Adler et. al, EMBO J. 1999, 18, 1321-1334). It is further known that GST-π participates in the S-glutathionylation of proteins associated with the stress response of cells (Townsend, et. al, J. Biol. Chem. 2009, 284, 436-445). In addition, it is known that GST-π contributes to a protective effect against cell death induced by reactive oxygen species (ROS) (Yin et. al, Cancer Res. 2000 60, 4053-4057). Thus, it can be understood that among the GST isozymes, GST-π has various features and functions.

[0007] It has been reported that when an siRNA against GST-π is allowed to act on a cancer cell line having a mutation in KRAS, the activation of Akt is inhibited so that autophagy is enhanced whereas apoptosis is moderately induced (Nishita et al., AACR 102nd Annual Meeting, Abstract No. 1065). WO2012/176282 discloses that use of a drug inhibiting GST-π and an autophagy inhibitor such as 3-methyladenine as active ingredients can induce the apoptosis of cancer cells. Furthermore, WO2014/098210 discloses that: when the expression of GST-π and the expression of Akt or the like are inhibited at the same time, cell growth is inhibited to induce cell death; and autophagy induced by the inhibition of GST-π expression is significantly inhibited by inhibiting the expression of GST-π and the expression Akt or the like at the same time.

[0008] However, much still remains unknown about the relation of the expression of GST-π in cancer cells to cell growth or cell death, the role of GST-π in signal transduction, etc.

### SUMMARY OF INVENTION

[0009] The present invention relates to a cell death-inducing agent and a cell growth-inhibiting agent for a cancer cell, and a pharmaceutical composition for the treatment of a disease caused by abnormal cell growth and further relates to a method for screening for a cell death-inducing agent and/or a cell growth-inhibiting agent.

[0010] Thus, an object of the present invention is to provide an agent having a cell death-inducing effect and/or a cell growth-inhibiting effect on a cancer cell, to provide a pharmaceutical composition for the treatment of a disease caused by abnormal cell growth, and to provide a method for screening for a cell death-inducing agent and/or a cell growth-inhibiting agent.

[0011] The present inventors have conducted diligent studies in light of the object mentioned above and consequently completed the present invention by finding that a homeostasis-related protein that exhibits synthetic lethality when inhibited together with GST-π is inhibited along with the inhibition of GST-π in a cancer cell, whereby cell death is more strongly induced and cell growth is more strongly inhibited as compared with the case where either of them is inhibited. The present invention encompasses the following:

[0012] (1) A cell death-inducing agent for a cancer cell comprising, as active ingredients, a drug inhibiting GST-π and a drug inhibiting a homeostasis-related protein that exhibits synthetic lethality when inhibited together with GST-π.

[0013] (2) A cell growth-inhibiting agent for a cancer cell comprising, as active ingredients, a drug inhibiting GST-π and a drug inhibiting a homeostasis-related protein that exhibits synthetic lethality when inhibited together with GST-π.

[0014] (3) The agent according to (1) or (2), wherein the homeostasis-related protein that exhibits synthetic lethality along with the inhibition of GST-π is a cell cycle-regulating protein or an anti-apoptosis-related protein.

[0015] (4) The agent according to (3), wherein the cell cycle-regulating protein that exhibits synthetic lethality along with the inhibition of GST-π is at least one cell cycle-regulating protein selected from the group consisting of ATM, CDC25A, p21, PRKDC, RBBP8, SKP2, MCM10, RNPC1, CCNL1, CENPH, BRSK1, MCM8, CCNB3, and MCMDC1.

[0016] (5) The agent according to (3), wherein the cell cycle-regulating protein that exhibits synthetic lethality along with the inhibition of GST-π is at least one protein selected from the group consisting of p21, RNPC1, CCNL1, MCM8, CCNB3, and MCMDC1.

[0017] (6) The agent according to (3), wherein the anti-apoptosis-related protein that exhibits synthetic lethality along with the inhibition of GST-π is at least one anti-apoptosis-related protein selected from the group consisting of AATF, AKT1, ALOX12, ANXA1, ANXA4, API5, ATF5, AVEN, AZU1, BAG1, BCL2L1, BFAR, CFLAR, IL2, MALT1, MCL1, MKL1, MPO, MTL5, MYBL2, and MYO18A.

[0018] (7) The agent according to (1) or (2), wherein the drug is a substance selected from the group consisting of an RNAi molecule, a ribozyme, an antisense nucleic acid, a DNA/RNA chimeric polynucleotide, and a vector for expressing at least one of them.

[0019] (8) The agent according to (1) or (2), wherein the drug inhibiting a homeostasis-related protein is a compound that acts on the homeostasis-related protein.

[0020] (9) The agent according to (1), wherein the agent induces apoptosis.

[0021] (10) The agent according to (1) or (2), wherein the cancer cell is a cancer cell highly expressing GST-π.

[0022] (11) A pharmaceutical composition for the treatment of a disease caused by abnormal cell growth, comprising an agent according to any of (1) to (10).

[0023] (12) The pharmaceutical composition according to (11), wherein the disease is a cancer.

[0024] (13) The pharmaceutical composition according to (12), wherein the cancer is a cancer highly expressing GST-π.

[0025] (14) A method for screening for a cell death-inducing agent and/or a cell growth-inhibiting agent for a cancer cell that is used together with a drug inhibiting GST-π, comprising a step of selecting a drug inhibiting a homeostasis-related protein that exhibits synthetic lethality when inhibited together with GST-π.

[0026] (15) The screening method according to (14), wherein the homeostasis-related protein that exhibits synthetic lethality along with the inhibition of GST-π is a cell cycle-regulating protein or an anti-apoptosis-related protein.

[0027] (16) The screening method according to (15), wherein the cell cycle-regulating protein that exhibits synthetic lethality along with the inhibition of GST-π is at least one protein selected from the group consisting of ATM, CDC25A, p21, PRKDC, RBBP8, SKP2, MCM10, RNPC1, CCNL1, CENPH, BRSK1, MCM8, CCNB3, and MCMDC1.

[0028] (17) The screening method according to (15), wherein the cell cycle-regulating protein that exhibits synthetic lethality along with the inhibition of GST-π is at least one protein selected from the group consisting of p21, RNPC1, CCNL1, MCM8, CCNB3, and MCMDC1.

[0029] (18) The screening method according to (15), wherein the anti-apoptosis-related protein that exhibits synthetic lethality along with the inhibition of GST-π is at least one anti-apoptosis-related protein selected from the group consisting of AATF, AKT1, ALOX12, ANXA1, ANXA4, API5, ATF5, AVEN, AZU1, BAG1, BCL2L1, BFAR, CFLAR, IL2, MALT1, MCL1, MKL1, MPO, MTL5, MYBL2, and MYO18A.

[0030] (19) The screening method according to any of (14) to (18), comprising the steps of: contacting a test substance with a cancer cell; measuring the expression level of the homeostasis-related protein in the cell; and selecting the test substance as a drug inhibiting the homeostasis-related protein when the expression level is decreased compared with that measured in the absence of the test substance.

[0031] (20) A method for screening for a cell death-inducing agent and/or cell growth-inhibiting agent for a cancer cell that is used together with a drug inhibiting a homeostasis-related protein that exhibits synthetic lethality when inhibited together with GST-π, comprising a step of selecting a drug inhibiting GST-π.

[0032] (21) The screening method according to (20), wherein the homeostasis-related protein that exhibits synthetic lethality along with the inhibition of GST-π is a cell cycle-regulating protein or an anti-apoptosis-related protein.

[0033] (22) The screening method according to (21), wherein the cell cycle-regulating protein that exhibits synthetic lethality along with the inhibition of GST-π is at least one protein selected from the group consisting of ATM, CDC25A, p21, PRKDC, RBBP8, SKP2, MCM10, RNPC1, CCNL1, CENPH, BRSK1, MCM8, CCNB3, and MCMDC1.

[0034] (23) The screening method according to (21), wherein the cell cycle-regulating protein that exhibits synthetic lethality along with the inhibition of GST-π is at least one protein selected from the group consisting of p21, RNPC1, CCNL1, MCM8, CCNB3, and MCMDC1.

[0035] (24) The screening method according to (21), wherein the anti-apoptosis-related protein that exhibits synthetic lethality along with the inhibition of GST-π is at least one anti-apoptosis-related protein selected from the group consisting of AATF, AKT1, ALOX12, ANXA1, ANXA4, API5, ATF5, AVEN, AZU1, BAG1, BCL2L1, BFAR, CFLAR, IL2, MALT1, MCL1, MKL1, MPO, MTL5, MYBL2, and MYO18A.

[0036] (25) The screening method according to any of (20) to (24), comprising the steps of: contacting a test substance with a cancer cell; measuring the expression level of GST-π in the cell; and selecting the test substance as a drug inhibiting GST-π when the expression level is decreased compared with that measured in the absence of the test substance.

[0037] (26) A method for screening for a cell death-inducing agent and/or a cell growth-inhibiting agent, comprising a step of selecting a drug inhibiting GST-π and homeostasis-related protein that exhibits synthetic lethality when inhibited together with GST-π.

[0038] (27) The screening method according to (26), wherein the homeostasis-related protein that exhibits synthetic lethality along with the inhibition of GST-π is a cell cycle-regulating protein or an anti-apoptosis-related protein.

[0039] (28) The screening method according to (27), wherein the cell cycle-regulating protein that exhibits synthetic lethality along with the inhibition of GST-π is at least one cell cycle-regulating protein selected from the group consisting of ATM, CDC25A, p21, PRKDC, RBBP8, SKP2, MCM10, RNPC1, CCNL1, CENPH, BRSK1, MCM8, CCNB3, and MCMDC1.

[0040] (29) The screening method according to (27), wherein the cell cycle-regulating protein that exhibits synthetic lethality along with the inhibition of GST-π is at least one protein selected from the group consisting of p21, RNPC1, CCNL1, MCM8, CCNB3, and MCMDC1.

[0041] (30) The screening method according to (27), wherein the anti-apoptosis-related protein that exhibits synthetic lethality along with the inhibition of GST-π is at least one anti-apoptosis-related protein selected from the group consisting of AATF, AKT1, ALOX12, ANXA1, ANXA4, API5, ATF5, AVEN, AZU1, BAG1, BCL2L1, BFAR, CFLAR, IL2, MALT1, MCL1, MKL1, MPO, MTL5, MYBL2, and MYO18A.

[0042] (31) The screening method according to any of (26) to (30), comprising the steps of: contacting a test substance with a cancer cell; measuring the expression level of GST-π and the expression level of the homeostasis-related protein that exhibits synthetic lethality when inhibited together with GST-π, in the cell; and selecting the test substance as a drug inhibiting GST-π and the homeostasis-related protein that exhibits synthetic lethality when inhibited together with GST-π when the expression level of GST-π and the expression level of the homeostasis-related protein that exhibits synthetic lethality when inhibited together with GST-π are both decreased compared with those measured in the absence of the test substance.

[0043] The cell death-inducing agent according to the present invention can very strongly induce cell death for a cancer cell. Accordingly, the cell death-inducing agent according to the present invention can exert very high efficacy as a pharmaceutical composition for the treatment of a disease caused by the abnormal growth of the cancer cell.

[0044] Moreover, the cell growth-inhibiting agent according to the present invention can very strongly inhibit cell growth for a cancer cell. Accordingly, the cell growth-inhibiting agent according to the present invention can exert very high efficacy as a pharmaceutical composition for the treatment of a disease caused by the abnormal growth of the cancer cell.

[0045] Furthermore, the screening method according to the present invention can select a drug that very strongly induces cell death and/or inhibits cell growth for a cancer cell.

### BRIEF DESCRIPTION OF THE DRAWINGS

[0046] This patent or application file contains at least one drawing executed in color. Copies of this patent or patent application publication with color drawings will be provided by the US Patent Office upon request and payment of the necessary fee.

[0047] FIG. 1 is a characteristic diagram showing results of assaying GST-π mRNA and p21 mRNA in cells expressing mutated KRAS when an siRNA inhibiting the expression of GST-π and/or an siRNA inhibiting the expression of p21 was allowed to act thereon.

[0048] FIG. 2 is a characteristic diagram showing results of quantifying over time p21 mRNA when GST-π and p21 were both knocked down.

[0049] FIG. 3 is a characteristic diagram showing results of measuring the number of cells when GST-π and p21 were both knocked down.

[0050] FIG. 4 is a characteristic diagram showing results of measuring the number of cells when GST-π and p21 were both knocked down three times.

[0051] FIG. 5 is a characteristic diagram showing results of measuring the number of cells when GST-π and p21 were both knocked down three times.

[0052] FIG. 6 is a photograph taken for the phase difference image of A549 cells when GST-π and p21 were both knocked down three times.

[0053] FIG. 7 is a photograph taken for the phase difference image of MIA PaCa-2 cells when GST-π and p21 were both knocked down three times.

[0054] FIG. 8 is a photograph taken for the phase difference image of PANC-1 cells when GST-π and p21 were both knocked down three times.

[0055] FIG. 9 is a photograph taken for the phase difference image of HCT116 cells when GST-π and p21 were both knocked down three times.

[0056] FIG. 10 is a photograph taken for the phase difference image of M7609 cells when GST-π was knocked down three times and β-galactosidase staining was carried out.

[0057] FIG. 11 is a characteristic diagram showing results of quantifying the expression of PUMA gene when GST-π and p21 were both knocked down.

[0058] FIG. 12 is a characteristic diagram showing results of comparing relative survival rates when GST-π and a candidate protein (cell cycle-regulating protein) exhibiting synthetic lethality were knocked down each alone and when GST-π and the candidate protein were both knocked down.

[0059] FIG. 13 is a characteristic diagram showing results of comparing relative survival rates when GST-π and a candidate protein (anti-apoptosis-related protein) exhibiting synthetic lethality were knocked down each alone and when GST-π and the candidate protein were both knocked down.

### DESCRIPTION OF THE PREFERRED EMBODIMENTS

[0060] The cell death-inducing agent and the cell growth-inhibiting agent according to the present invention comprise, as active ingredients, a drug inhibiting GST-π and a drug inhibiting a homeostasis-related protein that exhibits synthetic lethality when inhibited together with GST-π. The cell death-inducing agent and the cell growth-inhibiting agent according to the present invention exhibit a cell death-inducing effect and a cell growth-inhibiting effect on a cancer cell. In this context, the cancer cell is a cell that exhibits abnormal growth attributed to genes (cancer-related genes).

[0061] Of the cancer-related genes, examples of cancer genes can include KRAS gene, FOS gene, MYC gene, BCL-2 gene, and SIS gene. Also, of the cancer-related genes, examples of tumor suppressor genes can include RB gene, p53 gene, BRCA1 gene, NF1 gene, and p73 gene. However, the cancer cell is not limited to cancer cells in which these specific cancer-related genes are involved, and the agents of the present invention can be applied to a wide range of cells that exhibit abnormal cell growth.

[0062] Particularly, it is preferable that the cell death-inducing agent and the cell growth-inhibiting agent according to the present invention should be applied to a cancer cell highly expressing GST-π, among the cancer cells. In this context, the cancer cell highly expressing GST-π means a cell having a significantly higher expression level of GST-π than that of a normal cell, among the cells that exhibit abnormal cell growth (so-called cancer cells). The expression level of GST-π can be measured according to a standard method such as RT-PCR or microarrays.

[0063] In many cases, one example of the cancer cell highly expressing GST-π can include a cancer cell expressing mutated KRAS. Specifically, it is preferable that the cell death-inducing agent and the cell growth-inhibiting agent according to the present invention should be applied to the cancer cell expressing mutated KRAS.

[0064] The mutated KRAS means a protein having an amino acid sequence in which mutation(s) such as deletion, substitution, addition, and/or insertion is introduced in the amino acid sequence of wild-type KRAS. In this context, the mutation in the mutated KRAS is a so-called gain of function mutation. Specifically, in the cell expressing mutated KRAS, for example, GTPase activity is reduced due to the mutation so that GTP-bound active forms are maintained to thereby constitutively sustain signals to downstream pathway, resulting in abnormal cell growth as compared with the cell expressing wild-type KRAS. Examples of a gene encoding the mutated KRAS include a gene having a mutation at at least one of codon 12, codon 13, and codon 61 in the wild-type KRAS gene. Particularly, mutations at codons 12 and 13 are preferable for the mutated KRAS. Specific examples thereof include mutations by which glycine encoded by codon 12 of the KRAS gene is replaced with serine, aspartic acid, valine, cysteine, alanine, or arginine, and mutations by which glycine encoded by codon 13 of the KRAS gene is changed to aspartic acid.

[0065] As used herein, GST-π refers to an enzyme that is encoded by GSTP1 gene and catalyzes glutathione conjugation. GST-π is present in various animals including humans, and its sequence information is also publicly known (e.g., human: NM_000852 (NP_000843), rat: NM_012577 (NP_036709), mouse: NM_013541 (NP_038569), etc.; the numbers represent accession numbers of the NCBI database, and the nucleotide sequence and the amino acid sequence are indicated outside and inside the parentheses, respectively). As one example, the nucleotide sequence of the coding region of the human GST-π gene registered in the database is shown in SEQ ID NO: 1, and the amino acid sequence of the human GST-π protein encoded by this human GST-π gene is shown in SEQ ID NO: 2.

[0066] As used herein, the homeostasis-related protein that exhibits synthetic lethality when inhibited together with GST-π is a protein that results in a significantly high death rate of a cancer cell when inhibited together with GST-π as compared with the death rate of the cancer cell brought about by the inhibition of GST-π alone. This protein has the function of participating in cell homeostasis. In this context, the synthetic lethality means a phenomenon in which lethality is exerted or significantly enhanced for a cell or an individual by a combination of defects of a plurality of genes, though only one of the gene defects leads to no or low lethality. Particularly, in the present specification, the synthetic lethality means lethality for a cancer cell.

[0067] In the present specification, examples of the homeostasis-related protein that exhibits synthetic lethality when inhibited together with GST-π can include a cell cycle-regulating protein and an anti-apoptosis-related protein. The cell cycle-regulating protein is a protein having the function of regulating cell cycle. The anti-apoptosis-related protein is a protein having the function of suppressively participating in apoptosis.

[0068] Also, the protein having the function of regulating cell cycle is meant to include every protein involved in cell cycle consisting of the G1 phase (resting stage before DNA replication), the S phase (DNA synthesis stage), G2 (resting stage before cell division), and the M phase (cell division stage). More specifically, examples of the regulation of cell cycle can include each event of the regulation of the mechanism of promoting the G1 phase the S phase the G2 phase the M phase in order, the regulation of progression at the G1 phase to the S phase, and the regulation of progression at the G2 phase to the M phase. Thus, the cell cycle-regulating protein can be, for example, a protein that participates in the progression of these events in cell cycle and a protein that positively or negatively regulates these events. Further specifically, examples of the cell cycle-regulating protein include cyclin-dependent kinases (CDKs) essential for the initiation of the S phase and the M phase. The activity of the cyclin-dependent kinases is positively regulated by the binding of cyclins. Also, the activity of the cyclin-dependent kinases is negatively regulated by cyclin-dependent kinase inhibitors (CKIs) such as p21 (CIP1/WAF1) and tyrosine kinases. Thus, these proteins regulating the activity of the cyclin-dependent kinases, i.e., cyclins, cyclin-dependent kinase inhibitors (such as p21), and tyrosine kinases, are also included in the cell cycle-regulating protein.

[0069] Specifically, examples of the cell cycle-regulating protein that exhibits synthetic lethality when inhibited together with GST-π can include at least one cell cycle-regulating protein selected from the group consisting of ATM, CDC25A, p21, PRKDC, RBBP8, SKP2, MCM10, RNPC1, CCNL1, CENPH, BRSK1, MCM8, CCNB3, and MCMDC1. Of these 14 types of cell cycle-regulating proteins, one type of cell cycle-regulating protein may be inhibited together with GST-π, or two or more types of cell cycle-regulating proteins may be inhibited together with GST-π.

[0070] Particularly, it is preferable for the cell cycle-regulating protein that at least one cell cycle-regulating protein selected from the group consisting of p21, RNPC1, CCNL1, MCM8, CCNB3, and MCMDC1 should be inhibited together with GST-π. These 6 types of cell cycle-regulating proteins have a relatively low rate of cell growth inhibition when inhibited each alone, and exhibit a remarkably high cell growth-inhibiting effect only when inhibited together with GST-π. That is, it can be said that a drug inhibiting any of these 6 types of cell cycle-regulating proteins is excellent in safety by itself. Thus, it is preferable that the cell cycle-regulating protein that exhibits synthetic lethality when inhibited together with GST-π should be selected from these 6 types of cell cycle-regulating proteins.

[0071] p21 is a cell cycle-regulating protein that is encoded by CDKN1A gene and belongs to the CIP/KIP family. This protein has the function of inhibiting cell cycle progression at the G1 phase and the G2/M phase by inhibiting the effect of a cyclin-CDK complex through binding to the complex. Specifically, the p21 gene undergoes activation by p53 (one of tumor suppressor genes). It has been reported that upon activation of p53 due to DNA damage or the like, p53 activates p21 so that the cell cycle is arrested at the G1 phase and the G2/M phase. In addition, p21 also has the function of inhibiting apoptosis and has been reported to have the effect of protecting a cell from apoptosis induced by a chemotherapeutic agent or the like in in vitro and animal experiments (Gartel and Tyner, 2002; and Abbs and Dutta, 2009). p21 is present in various animals including humans, and its sequence information is also publicly known (e.g., human: NM_000389.4, NM_078467.2, NM_001291549.1, NM_001220778.1, NM_001220777.1 (NP_001207707.1, NP_001278478.1, NP_001207706.1, NP_510867.1, NP_000380.1), etc.; the numbers represent accession numbers of the NCBI database, and the nucleotide sequence and the amino acid sequence are indicated outside and inside the parentheses, respectively). As one example, the nucleotide sequence of the human CDKN1A gene registered in the database as NM_000389.4 is shown in SEQ ID NO: 3, and the amino acid sequence of the human p21 protein encoded by this human CDKN1A gene is shown in SEQ ID NO: 4. In the present specification, p21 is not limited to a protein consisting of the amino acid sequence of SEQ ID NO: 4 encoded by the nucleotide sequence of SEQ ID NO: 3. As for p21, sequence information has been registered with a plurality of accession numbers as mentioned above, and a plurality of transcript variants are present. The nucleotide sequence of SEQ ID NO: 3 represents the nucleotide sequence of one of these transcript variants.

[0072] RNPC1 is an RNA-binding protein encoded by RNPC1 gene and refers to a protein that is targeted by p53. RNPC1 is present in various animals including humans, and its sequence information is also publicly known (e.g., human: NM_017495.5, NM_183425.2, NM_001291780.1, XM_005260446.1 (XP_005260503.1, NP_059965.2, NP_906270.1, NP_001278709.1), etc.; the numbers represent accession numbers of the NCBI database, and the basic acid sequence and the amino acid sequence are indicated outside and inside the parentheses, respectively). As one example, the nucleotide sequence of the human RNPC1 gene registered in the database as NM_017495.5 is shown in SEQ ID NO: 5, and the amino acid sequence of the human RNPC1 protein encoded by this human RNPC1 gene is shown in SEQ ID NO: 6. In the present specification, RNPC1 is not limited to a protein consisting of the amino acid sequence of SEQ ID NO: 6 encoded by the nucleotide sequence of SEQ ID NO: 5. As for RNPC1, sequence information has been registered with a plurality of accession numbers as mentioned above, and a plurality of transcript variants are present. The nucleotide sequence of SEQ ID NO: 5 represents the nucleotide sequence of one of these transcript variants.

[0073] CCNL1 refers to cyclin-L1 encoded by CCNL1 gene. CCNL1 is present in various animals including humans, and its sequence information is also publicly known (e.g., human: NM_020307.2, XM_005247647.2, XM_005247648.1, XM_005247649.1, XM_005247650.1, XM_005247651.1, XM_006713710.1, XM_006713711.1 (XP_005247704.1, XP_005247705.1, XP_005247706.1, XP_005247707.1, XP_005247708.1, XP_006713773.1, NP_064703.1), etc.; the numbers represent accession numbers of the NCBI database, and the nucleotide sequence and the amino acid sequence are indicated outside and inside the parentheses, respectively). As one example, the nucleotide sequence of the human CCNL1 gene registered in the database as NM_020307.2 is shown in SEQ ID NO: 7, and the amino acid sequence of the human CCNL1 protein encoded by this human CCNL1 gene is shown in SEQ ID NO: 8. In the present specification, CCNL1 is not limited to a protein consisting of the amino acid sequence of SEQ ID NO: 8 encoded by the nucleotide sequence of SEQ ID NO: 7. As for CCNL1, sequence information has been registered with a plurality of accession numbers as mentioned above, and a plurality of transcript variants are present. The nucleotide sequence of SEQ ID NO: 7 represents the nucleotide sequence of one of these transcript variants.

[0074] MCM8 refers to mini-chromosome maintenance 8 encoded by MCM8 gene. MCM8 is present in various animals including humans, and its sequence information is also publicly known (e.g., human: NM_032485.5, NM_182802.2, NM_001281520.1, NM_001281521.1, NM_001281522.1, XM_005260859.1 (XP_005260916.1, NP_115874.3, NP_001268449.1, NP_877954.1, NP_001268450.1, NP_001268451.1), etc.; the numbers represent accession numbers of the NCBI database, and the nucleotide sequence and the amino acid sequence are indicated outside and inside the parentheses, respectively). As one example, the nucleotide sequence of the human MCM8 gene registered in the database as NM_032485.5 is shown in SEQ ID NO: 9, and the amino acid sequence of the human MCM8 protein encoded by this human MCM8 gene is shown in SEQ ID NO: 10. In the present specification, MCM8 is not limited to a protein consisting of the amino acid sequence of SEQ ID NO: 10 encoded by the nucleotide sequence of SEQ ID NO: 9. As for MCM8, sequence information has been registered with a plurality of accession numbers as mentioned above, and a plurality of transcript variants are present. The nucleotide sequence of SEQ ID NO: 9 represents the nucleotide sequence of one of these transcript variants.

[0075] CCNB3 refers to cyclin-B3 encoded by CCNB3 gene. CCNB3 is present in various animals including humans, and its sequence information is also publicly known (e.g., human: NM_033670.2, NM_033031.2, XM_006724610.1 (NP_391990.1, NP_149020.2, XP_006724673.1), etc.; the numbers represent accession numbers of the NCBI database, and the nucleotide sequence and the amino acid sequence are indicated outside and inside the parentheses, respectively). As one example, the nucleotide sequence of the human CCNB3 gene registered in the database as NM_033670.2 is shown in SEQ ID NO: 11, and the amino acid sequence of the human CCNB3 protein encoded by this human CCNB3 gene is shown in SEQ ID NO: 12. In the present specification, CCNB3 is not limited to a protein consisting of the amino acid sequence of SEQ ID NO: 12 encoded by the nucleotide sequence of SEQ ID NO: 11. As for CCNB3, sequence information has been registered with a plurality of accession numbers as mentioned above, and a plurality of transcript variants are present. The nucleotide sequence of SEQ ID NO: 11 represents the nucleotide sequence of one of these transcript variants.

[0076] MCMDC1 refers to mini-chromosome maintenance deficient domain containing 1 encoded by MCMDC1 gene. MCMDC1 is present in various animals including humans, and its sequence information is also publicly known (e.g., human: NM_017696.2, NM_153255.4 (NP_060166.2, NP_694987.1), etc.; the numbers represent accession numbers of the NCBI database, and the nucleotide sequence and the amino acid sequence are indicated outside and inside the parentheses, respectively). As one example, the nucleotide sequence of the human MCMDC1 gene registered in the database as NM_017696.2 is shown in SEQ ID NO: 13, and the amino acid sequence of the human MCMDC1 protein encoded by this human MCMDC1 gene is shown in SEQ ID NO: 14. In the present specification, MCMDC1 is not limited to a protein consisting of the amino acid sequence of SEQ ID NO: 14 encoded by the nucleotide sequence of SEQ ID NO: 13. As for MCMDC1, sequence information has been registered with a plurality of accession numbers as mentioned above, and a plurality of transcript variants are present. The nucleotide sequence of SEQ ID NO: 13 represents the nucleotide sequence of one of these transcript variants.

[0077] ATM is ATM serine/threonine kinase encoded by ATM gene and refers to a protein that belongs to the PI3/PI4 kinase family. ATM is present in various animals including humans, and its sequence information is also publicly known (e.g., human: NM_000051.3, XM_005271561.2, XM_005271562.2, XM_005271564.2, XM_006718843.1, XM_006718844.1, XM_006718845.1 (NP_000042.3, XP_005271618.2, XP_005271619.2, XP_005271621.2, XP_006718906.1, XP_006718907.1, XP_006718908.1), etc.; the numbers represent accession numbers of the NCBI database, and the nucleotide sequence and the amino acid sequence are indicated outside and inside the parentheses, respectively). As one example, the nucleotide sequence of the human ATM gene registered in the database as NM_000051.3 is shown in SEQ ID NO: 15, and the amino acid sequence of the human ATM protein encoded by this human ATM gene is shown in SEQ ID NO: 16. In the present specification, ATM is not limited to a protein consisting of the amino acid sequence of SEQ ID NO: 16 encoded by the nucleotide sequence of SEQ ID NO: 15. As for ATM, sequence information has been registered with a plurality of accession numbers as mentioned above, and a plurality of transcript variants are present. The nucleotide sequence of SEQ ID NO: 15 represents the nucleotide sequence of one of these transcript variants.

[0078] CDC25A is phosphatase that is encoded by CDC25A gene and belongs to the CDC25 family, and refers to a protein that activates CDC2 by dephosphorylation. CDC25A is present in various animals including humans, and its sequence information is also publicly known (e.g., human: NM_001789.2, NM_201567.1, XM_006713434.1, XM_006713435.1, XM_006713436.1 (NP_001780.2, NP_963861.1, XP_006713497.1, XP_006713498.1, XP_006713499.1), etc.; the numbers represent accession numbers of the NCBI database, and the nucleotide sequence and the amino acid sequence are indicated outside and inside the parentheses, respectively). As one example, the nucleotide sequence of the human CDC25A gene registered in the database as NM_001789.2 is shown in SEQ ID NO: 17, and the amino acid sequence of the human CDC25A protein encoded by this human CDC25A gene is shown in SEQ ID NO: 18. In the present specification, CDC25A is not limited to a protein consisting of the amino acid sequence of SEQ ID NO: 18 encoded by the nucleotide sequence of SEQ ID NO: 17. As for CDC25A, sequence information has been registered with a plurality of accession numbers as mentioned above, and a plurality of transcript variants are present. The nucleotide sequence of SEQ ID NO: 17 represents the nucleotide sequence of one of these transcript variants.

[0079] PRKDC is a catalytic subunit protein of DNA-dependent protein kinase encoded by PRKDC gene and refers to a protein that belongs to the PI3/PI4 kinase family. PRKDC is present in various animals including humans, and its sequence information is also publicly known (e.g., human: NM_006904.6, NM_001081640.1 (NP_008835.5, NP_001075109.1), etc.; the numbers represent accession numbers of the NCBI database, and the basic acid sequence and the amino acid sequence are indicated outside and inside the parentheses, respectively). As one example, the nucleotide sequence of the human PRKDC gene registered in the database as NM_006904.6 is shown in SEQ ID NO: 19, and the amino acid sequence of the human PRKDC protein encoded by this human PRKDC gene is shown in SEQ ID NO: 20. In the present specification, PRKDC is not limited to a protein consisting of the amino acid sequence of SEQ ID NO: 20 encoded by the nucleotide sequence of SEQ ID NO: 19. As for PRKDC, sequence information has been registered with a plurality of accession numbers as mentioned above, and a plurality of transcript variants are present. The nucleotide sequence of SEQ ID NO: 19 represents the nucleotide sequence of one of these transcript variants.

[0080] RBBP8 is retinoblastoma binding protein 8 encoded by RBBP8 gene and refers to a nuclear protein that binds directly to retinoblastoma protein. RBBP8 is present in various animals including humans, and its sequence information is also publicly known (e.g., human: NM_002894.2, NM_203291.1, NM_203292.1, XM_005258325.1, XM_005258326.1, XM_006722519.1, XM_006722520.1, XM_006722521.1, XM_006722522.1 (NP_002885.1, NP_976036.1, NP_976037.1, XP_005258382.1, XP_005258383.1, XP_006722582.1, XP_006722583.1, XP_006722584.1, XP_006722585.1), etc.; the numbers represent accession numbers of the NCBI database, and the nucleotide sequence and the amino acid sequence are indicated outside and inside the parentheses, respectively). As one example, the nucleotide sequence of the human RBBP8 gene registered in the database as NM_002894.2 is shown in SEQ ID NO: 21, and the amino acid sequence of the human RBBP8 protein encoded by this human RBBP8 gene is shown in SEQ ID NO: 22. In the present specification, RBBP8 is not limited to a protein consisting of the amino acid sequence of SEQ ID NO: 22 encoded by the nucleotide sequence of SEQ ID NO: 21. As for RBBP8, sequence information has been registered with a plurality of accession numbers as mentioned above, and a plurality of transcript variants are present. The nucleotide sequence of SEQ ID NO: 21 represents the nucleotide sequence of one of these transcript variants.

[0081] SKP2 is S-phase kinase-associated protein 2 encoded by SKP2 gene and refers to a protein that belongs to the Fbox protein, which is one of four subunits of E3 ubiquitin protein ligase. SKP2 is present in various animals including humans, and its sequence information is also publicly known (e.g., human: NM_005983.3, NM_032637.3, NM_001243120.1, XM_006714487.1 (NP_005974.2, NP_116026.1, NP_001230049.1, XP_006714550.1), etc.; the numbers represent accession numbers of the NCBI database, and the nucleotide sequence and the amino acid sequence are indicated outside and inside the parentheses, respectively). As one example, the nucleotide sequence of the coding region of the human SKP2 gene registered in the database as NM_005983.3 is shown in SEQ ID NO: 23, and the amino acid sequence of the human SKP2 protein encoded by this human SKP2 gene is shown in SEQ ID NO: 24. In the present specification, SKP2 is not limited to a protein consisting of the amino acid sequence of SEQ ID NO: 24 encoded by the nucleotide sequence of SEQ ID NO: 23. As for SKP2, sequence information has been registered with a plurality of accession numbers as mentioned above, and a plurality of transcript variants are present. The nucleotide sequence of SEQ ID NO: 23 represents the nucleotide sequence of one of these transcript variants.

[0082] MCM10 refers to mini-chromosome maintenance 10 encoded by MCM10 gene. MCM10 is present in various animals including humans, and its sequence information is also publicly known (e.g., human: NM_182751.2, NM_018518.4 (NP_877428.1, NP_060988.3), etc.; the numbers represent accession numbers of the NCBI database, and the nucleotide sequence and the amino acid sequence are indicated outside and inside the parentheses, respectively). As one example, the nucleotide sequence of the human MCM10 gene registered in the database as NM_182751.2 is shown in SEQ ID NO: 25, and the amino acid sequence of the human MCM10 protein encoded by this human MCM10 gene is shown in SEQ ID NO: 26. In the present specification, MCM10 is not limited to a protein consisting of the amino acid sequence of SEQ ID NO: 26 encoded by the nucleotide sequence of SEQ ID NO: 25. As for MCM10, sequence information has been registered with a plurality of accession numbers as mentioned above, and a plurality of transcript variants are present. The nucleotide sequence of SEQ ID NO: 25 represents the nucleotide sequence of one of these transcript variants.

[0083] CENPH is centromere protein H encoded by CENPH gene and refers to one of proteins constituting activated kinetochore located on the centromere. CENPH is present in various animals including humans, and its sequence information is also publicly known (e.g., human: NM_022909.3 (NP_075060.1), etc.; the numbers represent accession numbers of the NCBI database, and the nucleotide sequence and the amino acid sequence are indicated outside and inside the parentheses, respectively). As one example, the nucleotide sequence of the human CENPH gene registered in the database as NM_022909.3 is shown in SEQ ID NO: 27, and the amino acid sequence of the human CENPH protein encoded by this human CENPH gene is shown in SEQ ID NO: 28. In the present specification, CENPH is not limited to a protein consisting of the amino acid sequence of SEQ ID NO: 28 encoded by the nucleotide sequence of SEQ ID NO: 27. As for CENPH, there is the possibility that a plurality of transcript variants are present. The nucleotide sequence of SEQ ID NO: 27 represents the nucleotide sequence of a transcript variant.

[0084] BRSK1 is serine/threonine kinase encoded by BRSK1 gene and refers to kinase that acts at cell cycle checkpoint in DNA damage. BRSK1 is present in various animals including humans, and its sequence information is also publicly known (e.g., human: NM_032430.1, XM_005259327.1, XR_430213.1 (NP_115806.1, XP_005259384.1), etc.; the numbers represent accession numbers of the NCBI database, and the nucleotide sequence and the amino acid sequence are indicated outside and inside the parentheses, respectively). As one example, the nucleotide sequence of the human BRSK1 gene registered in the database as NM_032430.1 is shown in SEQ ID NO: 29, and the amino acid sequence of the human BRSK1 protein encoded by this human BRSK1 gene is shown in SEQ ID NO: 30. In the present specification, BRSK1 is not limited to a protein consisting of the amino acid sequence of SEQ ID NO: 30 encoded by the nucleotide sequence of SEQ ID NO: 29. As for BRSK1, sequence information has been registered with a plurality of accession numbers as mentioned above, and a plurality of transcript variants are present. The nucleotide sequence of SEQ ID NO: 29 represents the nucleotide sequence of one of these transcript variants.

[0085] On the other hand, the protein having the function of suppressively participating in apoptosis means a protein having the function of inhibiting apoptosis by inhibiting mechanisms such as karyopyknosis, cell contraction, membrane blebbing, and DNA fragmentation. The function of suppressively participating in apoptosis is meant to include both of the function of inhibiting apoptosis and the function of inhibiting a factor promoting apoptosis. Examples of the factor promoting apoptosis can include many factors such as caspase, Fas, and TNFR.

[0086] Specifically, examples of the anti-apoptosis-related protein that exhibits synthetic lethality when inhibited together with GST-π can include at least one anti-apoptosis-related protein selected from the group consisting of AATF, AKT1, ALOX12, ANXA1, ANXA4, API5, ATF5, AVEN, AZU1, BAG1, BCL2L1, BFAR, CFLAR, IL2, MALT1, MCL1, MKL1, MPO, MTL5, MYBL2, and MYO18A. Of these 21 types of anti-apoptosis-related proteins, one type of anti-apoptosis-related protein may be inhibited together with GST-π, or two or more types of anti-apoptosis-related proteins may be inhibited together with GST-π.

[0087] AATF was identified on the basis of its interaction with MAP3K12/DLK, a protein kinase known to be involved in the induction of cell apoptosis. AATF contains a leucine zipper, which is a characteristic motif of transcription factors, and has been shown to exhibit strong transactivation activity when fused to Gal4 DNA-binding domain. Overexpression of the gene encoding AATF is known to inhibit MAP3K12-induced apoptosis. AATF is present in various animals including humans, and its sequence information is also publicly known (e.g., human: NM_012138.3, XM_011546799.1, XM_011524611.1, XR_951958.1, XR_934439.1 (NP_036270.1, XP_011545101.1, XP_011522913.1), etc.; the numbers represent accession numbers of the NCBI database, and the nucleotide sequence and the amino acid sequence are indicated outside and inside the parentheses, respectively). As one example, the nucleotide sequence of the human AATF gene registered in the database as NM_012138.3 is shown in SEQ ID NO: 39, and the amino acid sequence of the human AATF protein encoded by this human AATF gene is shown in SEQ ID NO: 40. In the present specification, AATF is not limited to a protein consisting of the amino acid sequence of SEQ ID NO: 40 encoded by the nucleotide sequence of SEQ ID NO: 39. As for AATF, sequence information has been registered with a plurality of accession numbers as mentioned above, and a plurality of transcript variants are present. The nucleotide sequence of SEQ ID NO: 39 represents the nucleotide sequence of one of these transcript variants.

[0088] AKT1, serine-threonine protein kinase, is known to be catalytically inactive in serum-starved primary and immortalized fibroblasts. AKT1 and AKT2 are activated by platelet-derived growth factor. It is also known that the activation occurs through phosphatidylinositol 3-kinase. The activation of AKT1 is known to suppress apoptosis in a transcription-independent manner. AKT1 is present in various animals including humans, and its sequence information is also publicly known (e.g., human: NM_005163.2, NM_001014432.1, NM_001014431.1, XM_011536543.1 (NP_005154.2, AAL55732.1, AAH84538.1, AAH00479.1), etc.; the numbers represent accession numbers of the NCBI database, and the nucleotide sequence and the amino acid sequence are indicated outside and inside the parentheses, respectively). As one example, the nucleotide sequence of the human AKT1 gene registered in the database as NM_005163.2 is shown in SEQ ID NO: 41, and the amino acid sequence of the human AKT1 protein encoded by this human AKT1 gene is shown in SEQ ID NO: 42. In the present specification, AKT1 is not limited to a protein consisting of the amino acid sequence of SEQ ID NO: 42 encoded by the nucleotide sequence of SEQ ID NO: 41. As for AKT1, sequence information has been registered with a plurality of accession numbers as mentioned above, and a plurality of transcript variants are present. The nucleotide sequence of SEQ ID NO: 41 represents the nucleotide sequence of one of these transcript variants.

[0089] ALOX12, arachidonate 12-lipoxygenase, is known to be involved in atherosclerosis, osteoporosis, and the like. ALOX12 is also known to positively regulate angiogenesis through regulation of the expression of the vascular endothelial growth factor and to play a role in apoptotic process by promoting the survival of vascular smooth muscle cells or the like. ALOX12 is present in various animals including humans, and its sequence information is also publicly known (e.g., human: NM_000697.2, XM_011523780.1 (NP_000688.2, XP_011522082.1, AAH69557.1), etc.; the numbers represent accession numbers of the NCBI database, and the nucleotide sequence and the amino acid sequence are indicated outside and inside the parentheses, respectively). As one example, the nucleotide sequence of the human ALOX12 gene registered in the database as NM_000697.2 is shown in SEQ ID NO: 43, and the amino acid sequence of the human ALOX12 protein encoded by this human ALOX12 gene is shown in SEQ ID NO: 44. In the present specification, ALOX12 is not limited to a protein consisting of the amino acid sequence of SEQ ID NO: 44 encoded by the nucleotide sequence of SEQ ID NO: 43. As for ALOX12, sequence information has been registered with a plurality of accession numbers as mentioned above, and a plurality of transcript variants are present. The nucleotide sequence of SEQ ID NO: 43 represents the nucleotide sequence of one of these transcript variants.

[0090] ANXA1 is a membrane-localized protein that binds to phospholipids. ANXA1 inhibits phospholipase A2 and has anti-inflammatory activity. ANXA1 is present in various animals including humans, and its sequence information is also publicly known (e.g., human: NM_000700.2, XM_011518609.1, XM_011518608.1 (NP_000691.1, AAH34157.1), etc.; the numbers represent accession numbers of the NCBI database, and the nucleotide sequence and the amino acid sequence are indicated outside and inside the parentheses, respectively). As one example, the nucleotide sequence of the human ANXA1 gene registered in the database as NM_000700.2 is shown in SEQ ID NO: 45, and the amino acid sequence of the human ANXA1 protein encoded by this human ANXA1 gene is shown in SEQ ID NO: 46. In the present specification, ANXA1 is not limited to a protein consisting of the amino acid sequence of SEQ ID NO: 46 encoded by the nucleotide sequence of SEQ ID NO: 45. As for ANXA1, sequence information has been registered with a plurality of accession numbers as mentioned above, and a plurality of transcript variants are present. The nucleotide sequence of SEQ ID NO: 45 represents the nucleotide sequence of one of these transcript variants.

[0091] ANXA4 belongs to the annexin family of calcium-dependent phospholipid-binding proteins. This protein has possible interactions with ATP and is known to have in vitro anticoagulant activity and to inhibit phospholipase A2. ANXA4 is present in various animals including humans, and its sequence information is also publicly known (e.g., human: NM_001153.3, XM_011532805.1 (NP_001144.1, XP_011531107.1, AAH63672.1, AAH00182.1, AAH11659.1), etc.; the numbers represent accession numbers of the NCBI database, and the nucleotide sequence and the amino acid sequence are indicated outside and inside the parentheses, respectively). As one example, the nucleotide sequence of the human ANXA4 gene registered in the database as NM_001153.3 is shown in SEQ ID NO: 47, and the amino acid sequence of the human ANXA4 protein encoded by this human ANXA4 gene is shown in SEQ ID NO: 48. In the present specification, ANXA4 is not limited to a protein consisting of the amino acid sequence of SEQ ID NO: 48 encoded by the nucleotide sequence of SEQ ID NO: 47. As for ANXA4, sequence information has been registered with a plurality of accession numbers as mentioned above, and a plurality of transcript variants are present. The nucleotide sequence of SEQ ID NO: 47 represents the nucleotide sequence of one of these transcript variants.

[0092] API5 is an apoptosis inhibitory protein whose expression is known to prevent apoptosis after growth factor deprivation. API5 suppresses the transcription factor E2F1-induced apoptosis and also interacts with and negatively regulates Acinus, a nuclear factor involved in apoptotic DNA fragmentation. API5 is present in various animals including humans, and its sequence information is also publicly known (e.g., human: NM_001142930.1, NM_006595.3, NM_001243747.1, NM_001142931.1, XM_006718359.2, NR_024625.1 (NP_001136402.1, NP_001136403.1, NP_001230676.1, NP_006586.1, XP_006718422.1), etc.; the numbers represent accession numbers of the NCBI database, and the nucleotide sequence and the amino acid sequence are indicated outside and inside the parentheses, respectively). As one example, the nucleotide sequence of the human API5 gene registered in the database as NM_001142930.1 is shown in SEQ ID NO: 49, and the amino acid sequence of the human API5 protein encoded by this human API5 gene is shown in SEQ ID NO: 50. In the present specification, API5 is not limited to a protein consisting of the amino acid sequence of SEQ ID NO: 50 encoded by the nucleotide sequence of SEQ ID NO: 49. As for API5, sequence information has been registered with a plurality of accession numbers as mentioned above, and a plurality of transcript variants are present. The nucleotide sequence of SEQ ID NO: 49 represents the nucleotide sequence of one of these transcript variants.

[0093] ATF5 is known to be involved in diseases caused by human T-cell leukemia virus type 1. ATF5 is a transcriptional activator that binds to the cAMP response element (CRE) present in many viral promoters, etc., and is known to inhibit the differentiation of neuroprogenitor cells into neurons. ATF5 is present in various animals including humans, and its sequence information is also publicly known (e.g., human: NM_012068.5, NM_001193646.1, NM_001290746.1, XM_011526629.1 (NP_036200.2, NP_001277675.1, NP_001180575.1, XP_011524931.1), etc.; the numbers represent accession numbers of the NCBI database, and the nucleotide sequence and the amino acid sequence are indicated outside and inside the parentheses, respectively). As one example, the nucleotide sequence of the human ATF5 gene registered in the database as NM_012068.5 is shown in SEQ ID NO: 51, and the amino acid sequence of the human ATF5 protein encoded by this human ATF5 gene is shown in SEQ ID NO: 52. In the present specification, ATF5 is not limited to a protein consisting of the amino acid sequence of SEQ ID NO: 52 encoded by the nucleotide sequence of SEQ ID NO: 51. As for ATF5, sequence information has been registered with a plurality of accession numbers as mentioned above, and a plurality of transcript variants are present. The nucleotide sequence of SEQ ID NO: 51 represents the nucleotide sequence of one of these transcript variants.

[0094] AVEN is a protein known as an apoptosis, caspase activation inhibitor and is known to be involved in schizoid personality disorder and alexithymia. AVEN is also known to inhibit apoptosis mediated by Apaf-1. AVEN is present in various animals including humans, and its sequence information is also publicly known (e.g., human: NM_020371.2, XM_011521820.1, XM_005254563.2, XM_011521819.1, XM_011521818.1 (NP NP_065104.1, XP_011520122.1, XP_011520121.1, XP_011520120.1, XP_005254620.1, AAH63533.1, AAF91470.1), etc.; the numbers represent accession numbers of the NCBI database, and the nucleotide sequence and the amino acid sequence are indicated outside and inside the parentheses, respectively). As one example, the nucleotide sequence of the human AVEN gene registered in the database as NM_020371.2 is shown in SEQ ID NO: 53, and the amino acid sequence of the human AVEN protein encoded by this human AVEN gene is shown in SEQ ID NO: 54. In the present specification, AVEN is not limited to a protein consisting of the amino acid sequence of SEQ ID NO: 54 encoded by the nucleotide sequence of SEQ ID NO: 53. As for AVEN, sequence information has been registered with a plurality of accession numbers as mentioned above, and a plurality of transcript variants are present. The nucleotide sequence of SEQ ID NO: 53 represents the nucleotide sequence of one of these transcript variants.

[0095] AZU1 is a protein contained in azurophil granules and has monocyte chemotactic and antimicrobial activity. AZU1 is an important multifunctional inflammatory mediator. AZU1 is present in various animals including humans, and its sequence information is also publicly known (e.g., human: NM_001700.3 (NP_001691.1, EAW69592.1, AAH93933.1, AAH93931.1, AAH69495.1), etc.; the numbers represent accession numbers of the NCBI database, and the nucleotide sequence and the amino acid sequence are indicated outside and inside the parentheses, respectively). As one example, the nucleotide sequence of the human AZU1 gene registered in the database as NM_001700.3 is shown in SEQ ID NO: 55, and the amino acid sequence of the human AZU1 protein encoded by this human AZU1 gene is shown in SEQ ID NO: 56. In the present specification, AZU1 is not limited to a protein consisting of the amino acid sequence of SEQ ID NO: 56 encoded by the nucleotide sequence of SEQ ID NO: 55. As for AZU1, sequence information has been registered with a plurality of accession numbers as mentioned above, and a plurality of transcript variants are present. The nucleotide sequence of SEQ ID NO: 55 represents the nucleotide sequence of one of these transcript variants.

[0096] BAG1 binds to BCL2, a membrane protein that inhibits a pathway leading to apoptosis or programmed cell death. BAG1 enhances the anti-apoptotic effects of BCL2 and represents a link between growth factor receptors and anti-apoptotic mechanisms. BAG1 is present in various animals including humans, and its sequence information is also publicly known (e.g., human: NM_004323.5, NM_001172415.1 (NP_004314.5, NP_001165886.1, AAH14774.2), etc.; the numbers represent accession numbers of the NCBI database, and the nucleotide sequence and the amino acid sequence are indicated outside and inside the parentheses, respectively). As one example, the nucleotide sequence of the human BAG1 gene registered in the database as NM_004323.5 is shown in SEQ ID NO: 57, and the amino acid sequence of the human BAG1 protein encoded by this human BAG1 gene is shown in SEQ ID NO: 58. In the present specification, BAG1 is not limited to a protein consisting of the amino acid sequence of SEQ ID NO: 58 encoded by the nucleotide sequence of SEQ ID NO: 57. As for BAG1, sequence information has been registered with a plurality of accession numbers as mentioned above, and a plurality of transcript variants are present. The nucleotide sequence of SEQ ID NO: 57 represents the nucleotide sequence of one of these transcript variants.

[0097] BCL2L1 belongs to the BCL-2 protein family. Members of this protein family form hetero- or homodimers and act as anti- or pro-apoptotic regulators that are involved in a wide variety of cellular activities. BCL2L1 is located at the outer mitochondrial membrane and has been shown to regulate outer mitochondrial membrane channel opening. BCL2L1 is present in various animals including humans, and its sequence information is also publicly known (e.g., human: NM_138578.1, NM_001191.2, XM_011528966.1, XM_011528965.1, XM_011528961.1, XM_011528960.1, XM_011528964.1, XM_011528963.1, XM_011528962.1, XM_005260487.3, XM_005260486.2 (NP_612815.1, NP_001182.1, AAH19307.1, XP_011527268.1, XP_011527267.1, XP_011527266.1, XP_011527265.1, XP_011527264.1, XP_011527263.1, XP_011527262.1, XP_005260544.1, XP_005260543.1), etc.; the numbers represent accession numbers of the NCBI database, and the nucleotide sequence and the amino acid sequence are indicated outside and inside the parentheses, respectively). As one example, the nucleotide sequence of the human BCL2L1 gene registered in the database as NM_138578.1 is shown in SEQ ID NO: 59, and the amino acid sequence of the human BCL2L1 protein encoded by this human BCL2L1 gene is shown in SEQ ID NO: 60. In the present specification, BCL2L1 is not limited to a protein consisting of the amino acid sequence of SEQ ID NO: 60 encoded by the nucleotide sequence of SEQ ID NO: 59. As for BCL2L1, sequence information has been registered with a plurality of accession numbers as mentioned above, and a plurality of transcript variants are present. The nucleotide sequence of SEQ ID NO: 59 represents the nucleotide sequence of one of these transcript variants.

[0098] BFAR, a bifunctional apoptosis regulator, has anti-apoptotic activity, both against apoptosis triggered via cell death-receptors and against apoptosis triggered via mitochondrial factors. BFAR is present in various animals including humans, and its sequence information is also publicly known (e.g., human: NM_016561.2, XM_006725196.2, XM_011546704.1, XM_005255350.2, XM_011522520.1 (NP_057645.1, XP_011545006.1, XP_011520822.1, XP_006725259.1, XP_005255407.1, AAH03054.1), etc.; the numbers represent accession numbers of the NCBI database, and the nucleotide sequence and the amino acid sequence are indicated outside and inside the parentheses, respectively). As one example, the nucleotide sequence of the human BFAR gene registered in the database as NM_016561.2 is shown in SEQ ID NO: 61, and the amino acid sequence of the human BFAR protein encoded by this human BFAR gene is shown in SEQ ID NO: 62. In the present specification, BFAR is not limited to a protein consisting of the amino acid sequence of SEQ ID NO: 62 encoded by the nucleotide sequence of SEQ ID NO: 61. As for BFAR, sequence information has been registered with a plurality of accession numbers as mentioned above, and a plurality of transcript variants are present. The nucleotide sequence of SEQ ID NO: 61 represents the nucleotide sequence of one of these transcript variants.

[0099] CFLAR, a regulator of apoptosis, is known to be structurally similar to caspase-8. However, CFLAR lacks caspase activity and is cleaved into two peptides by caspase-8. CFLAR is present in various animals including humans, and its sequence information is also publicly known (e.g., human: NM_003879.5, NM_001202519.1, NM_001202518.1, NM_001308043.1, NM_001308042.1, NM_001202517.1, NM_001202516.1, NM_001127184.2, NM_001202515.1, NM_001127183.2, XM_011512100.1 (NP_003870.4, NP_001294972.1, NP_001294971.1, NP_001189448.1, NP_001189446.1, NP_001189445.1, NP_001189444.1, NP_001120656.1, XP_011510402.1), etc.; the numbers represent accession numbers of the NCBI database, and the nucleotide sequence and the amino acid sequence are indicated outside and inside the parentheses, respectively). As one example, the nucleotide sequence of the human CFLAR gene registered in the database as NM_003879.5 is shown in SEQ ID NO: 63, and the amino acid sequence of the human CFLAR protein encoded by this human CFLAR gene is shown in SEQ ID NO: 64. In the present specification, CFLAR is not limited to a protein consisting of the amino acid sequence of SEQ ID NO: 64 encoded by the nucleotide sequence of SEQ ID NO: 63. As for CFLAR, sequence information has been registered with a plurality of accession numbers as mentioned above, and a plurality of transcript variants are present. The nucleotide sequence of SEQ ID NO: 63 represents the nucleotide sequence of one of these transcript variants.

[0100] IL2, interleukin 2, is a secreted cytokine that is important for the proliferation of T and B lymphocytes. IL2 is present in various animals including humans, and its sequence information is also publicly known (e.g., human: NM_000586.3 (NP_000577.2), etc.; the numbers represent accession numbers of the NCBI database, and the nucleotide sequence and the amino acid sequence are indicated outside and inside the parentheses, respectively). As one example, the nucleotide sequence of the human IL2 gene registered in the database as NM_000586.3 is shown in SEQ ID NO: 65, and the amino acid sequence of the human IL2 protein encoded by this human IL2 gene is shown in SEQ ID NO: 66. In the present specification, IL2 is not limited to a protein consisting of the amino acid sequence of SEQ ID NO: 66 encoded by the nucleotide sequence of SEQ ID NO: 65. As for IL2, there is the possibility that a plurality of transcript variants are present. The nucleotide sequence of SEQ ID NO: 65 represents the nucleotide sequence of a transcript variant.

[0101] MALT1 is encoded by a gene that is recurrently rearranged in chromosomal translocation with baculoviral IAP repeat-containing protein 3 (also known as apoptosis inhibitor 2) and immunoglobulin heavy chain locus in mucosa-associated lymphoid tissue lymphomas. MALT1 may activate NFκB. MALT1 is present in various animals including humans, and its sequence information is also publicly known (e.g., human: NM_173844.2, NM_006785.3, XM_011525794.1 (NP_776216.1, NP_006776.1, XP_011524096.1), etc.; the numbers represent accession numbers of the NCBI database, and the nucleotide sequence and the amino acid sequence are indicated outside and inside the parentheses, respectively). As one example, the nucleotide sequence of the human MALT1 gene registered in the database as NM_006785.3 is shown in SEQ ID NO: 67, and the amino acid sequence of the human MALT1 protein encoded by this human MALT1 gene is shown in SEQ ID NO: 68. In the present specification, MALT1 is not limited to a protein consisting of the amino acid sequence of SEQ ID NO: 68 encoded by the nucleotide sequence of SEQ ID NO: 67. As for MALT1, sequence information has been registered with a plurality of accession numbers as mentioned above, and a plurality of transcript variants are present. The nucleotide sequence of SEQ ID NO: 67 represents the nucleotide sequence of one of these transcript variants.

[0102] MCL1 is an anti-apoptotic protein, which is a member of the Bcl-2 family. The longest variant resulting from the alternative splicing of the MCL1 gene enhances cell survival by inhibiting apoptosis, while the alternatively spliced shorter variants promote apoptosis and induce cell death. MCL1 is present in various animals including humans, and its sequence information is also publicly known (e.g., human: NM_021960.4, NM_001197320.1, NM_182763.2 (NP_068779.1, NP_001184249.1, NP_877495.1), etc.; the numbers represent accession numbers of the NCBI database, and the nucleotide sequence and the amino acid sequence are indicated outside and inside the parentheses, respectively). As one example, the nucleotide sequence of the human MCL1 gene registered in the database as NM_021960.4 is shown in SEQ ID NO: 69, and the amino acid sequence of the human MCL1 protein encoded by this human MCL1 gene is shown in SEQ ID NO: 70. In the present specification, MCL1 is not limited to a protein consisting of the amino acid sequence of SEQ ID NO: 70 encoded by the nucleotide sequence of SEQ ID NO: 69. As for MCL1, sequence information has been registered with a plurality of accession numbers as mentioned above, and a plurality of transcript variants are present. The nucleotide sequence of SEQ ID NO: 69 represents the nucleotide sequence of one of these transcript variants.

[0103] MKL1 is known to interact with the transcription factor myocardin, a key regulator of smooth muscle cell differentiation. MKL1 is predominantly nuclear and helps transduce signals from the cytoskeleton to the nucleus. The MKL1 gene is involved in a translocation event that creates a fusion of this gene and the RNA-binding motif protein-15 gene. MKL1 is present in various animals including humans, and its sequence information is also publicly known (e.g., human: NM_001282662.1, NM_001282660.1, NM_020831.4, NM_001282661.1, XM_011530287.1, XM_011530286.1, XM_011530285.1, XM_011530284.1, XM_011530283.1, XM_005261691.3 (NP_001269591.1, NP_001269589.1, NP_065882.1, NP_001269590.1, XP_011528589.1, XP_011528588.1, XP_011528587.1, XP_011528586.1, XP_011528585.1, XP_005261751.1, XP_005261749.1, XP_005261748.1), etc.; the numbers represent accession numbers of the NCBI database, and the nucleotide sequence and the amino acid sequence are indicated outside and inside the parentheses, respectively). As one example, the nucleotide sequence of the human MKL1 gene registered in the database as NM_001282662.1 is shown in SEQ ID NO: 71, and the amino acid sequence of the human MKL1 protein encoded by this human MKL1 gene is shown in SEQ ID NO: 72. In the present specification, MKL1 is not limited to a protein consisting of the amino acid sequence of SEQ ID NO: 72 encoded by the nucleotide sequence of SEQ ID NO: 71. As for MKL1, sequence information has been registered with a plurality of accession numbers as mentioned above, and a plurality of transcript variants are present. The nucleotide sequence of SEQ ID NO: 71 represents the nucleotide sequence of one of these transcript variants.

[0104] MPO, myeloperoxidase, is a heme protein that is synthesized during myeloid differentiation and constitutes the major component of neutrophil azurophil granules. MPO produces hypohalous acids central to the microbicidal activity of neutrophils. MPO is present in various animals including humans, and its sequence information is also publicly known (e.g., human: NM_000250.1, XM_011524823.1, XM_011524822.1, XM_011524821.1 (NP_000241.1), etc.; the numbers represent accession numbers of the NCBI database, and the nucleotide sequence and the amino acid sequence are indicated outside and inside the parentheses, respectively). As one example, the nucleotide sequence of the human MPO gene registered in the database as NM_000250.1 is shown in SEQ ID NO: 73, and the amino acid sequence of the human MPO protein encoded by this human MPO gene is shown in SEQ ID NO: 74. In the present specification, MPO is not limited to a protein consisting of the amino acid sequence of SEQ ID NO: 74 encoded by the nucleotide sequence of SEQ ID NO: 73. As for MPO, sequence information has been registered with a plurality of accession numbers as mentioned above, and a plurality of transcript variants are present. The nucleotide sequence of SEQ ID NO: 73 represents the nucleotide sequence of one of these transcript variants.

[0105] MTL5, a metallothionein-like protein, has been shown to be expressed specifically in the mouse testis and ovary. Metallothionein may play a central role in the regulation of cell growth and differentiation and be involved in spermatogenesis. MTL5 is present in various animals including humans, and its sequence information is also publicly known (e.g., human:

[0106] NM_004923.3, NM_001039656.1, XM_011545404.1, XM_011545403.1, XM_011545402.1 (NP_001034745.1, NP_004914.2, XP_011543706.1, XP_011543705.1, XP_011543704.1), etc.; the numbers represent accession numbers of the NCBI database, and the nucleotide sequence and the amino acid sequence are indicated outside and inside the parentheses, respectively). As one example, the nucleotide sequence of the human MTL5 gene registered in the database as NM_004923.3 is shown in SEQ ID NO: 75, and the amino acid sequence of the human MTL5 protein encoded by this human MTL5 gene is shown in SEQ ID NO: 76. In the present specification, MTL5 is not limited to a protein consisting of the amino acid sequence of SEQ ID NO: 76 encoded by the nucleotide sequence of SEQ ID NO: 75. As for MTL5, sequence information has been registered with a plurality of accession numbers as mentioned above, and a plurality of transcript variants are present. The nucleotide sequence of SEQ ID NO: 75 represents the nucleotide sequence of one of these transcript variants.

[0107] MYBL2 is a nuclear protein that belongs to the MYB family of transcription factors and is involved in cell cycle progression. MYBL2 is phosphorylated by cyclin A/cyclin-dependent kinase 2 during the S-phase of the cell cycle and possesses both activator and repressor activities. MYBL2 is present in various animals including humans, and its sequence information is also publicly known (e.g., human: NM_001278610.1, NM_002466.3 (NP_001265539.1, NP_002457.1), etc.; the numbers represent accession numbers of the NCBI database, and the nucleotide sequence and the amino acid sequence are indicated outside and inside the parentheses, respectively). As one example, the nucleotide sequence of the human MYBL2 gene registered in the database as NM_002466.3 is shown in SEQ ID NO: 77, and the amino acid sequence of the human MYBL2 protein encoded by this human MYBL2 gene is shown in SEQ ID NO: 78. In the present specification, MYBL2 is not limited to a protein consisting of the amino acid sequence of SEQ ID NO: 78 encoded by the nucleotide sequence of SEQ ID NO: 77. As for MYBL2, sequence information has been registered with a plurality of accession numbers as mentioned above, and a plurality of transcript variants are present. The nucleotide sequence of SEQ ID NO: 77 represents the nucleotide sequence of one of these transcript variants.

[0108] MYO18A, myosin 18A, is known to be involved in 8p11 myeloproliferative syndrome. MYO18A has motor activity and ATPase activity. MYO18A is present in various animals including humans, and its sequence information is also publicly known (e.g., human: NM_203318.1, NM_078471.3 (NP_976063.1, NP_510880.2), etc.; the numbers represent accession numbers of the NCBI database, and the nucleotide sequence and the amino acid sequence are indicated outside and inside the parentheses, respectively). As one example, the nucleotide sequence of the human MYO18A gene registered in the database as NM_078471.3 is shown in SEQ ID NO: 79, and the amino acid sequence of the human MYO18A protein encoded by this human MYO18A gene is shown in SEQ ID NO: 80. In the present specification, MYO18A is not limited to a protein consisting of the amino acid sequence of SEQ ID NO: 80 encoded by the nucleotide sequence of SEQ ID NO: 79. As for MYO18A, sequence information has been registered with a plurality of accession numbers as mentioned above, and a plurality of transcript variants are present. The nucleotide sequence of SEQ ID NO: 79 represents the nucleotide sequence of one of these transcript variants.

[0109] Although GST-π, ATM, CDC25A, p21, PRKDC, RBBP8, SKP2, MCM10, RNPC1, CCNL1, CENPH, BRSK1, MCM8, CCNB3, MCMDC1, AATF, AKT1, ALOX12, ANXA1, ANXA4, API5, ATF5, AVEN, AZU1, BAG1, BCL2L1, BFAR, CFLAR, IL2, MALT1, MCL1, MKL1, MPO, MTL5, MYBL2, and MYO18A can be identified by specific nucleotide sequences and amino acid sequences as mentioned above, the possibility must be taken into consideration that mutations occur in the nucleotide sequences or the amino acid sequences among organism individuals.

[0110] Specifically, GST-π, ATM, CDC25A, p21, PRKDC, RBBP8, SKP2, MCM10, RNPC1, CCNL1, CENPH, BRSK1, MCM8, CCNB3, MCMDC1, AATF, AKT1, ALOX12, ANXA1, ANXA4, API5, ATF5, AVEN, AZU1, BAG1, BCL2L1, BFAR, CFLAR, IL2, MALT1, MCL1, MKL1, MPO, MTL5, MYBL2, and MYO18A are not limited to proteins having the same sequences as the amino acid sequences registered in the database and include proteins that have sequences differing from these sequences by 1 or 2 or more, typically, 1 or several, for example, 1, 2, 3, 4, 5, 6, 7, 8, 9, or 10 amino acids and have functions equivalent to GST-π, ATM, CDC25A, p21, PRKDC, RBBP8, SKP2, MCM10, RNPC1, CCNL1, CENPH, BRSK1, MCM8, CCNB3, MCMDC1, AATF, AKT1, ALOX12, ANXA1, ANXA4, API5, ATF5, AVEN, AZU1, BAG1, BCL2L1, BFAR, CFLAR, IL2, MALT1, MCL1, MKL1, MPO, MTL5, MYBL2, and MYO18A.

[0111] Moreover, GST-π, ATM, CDC25A, p21, PRKDC, RBBP8, SKP2, MCM10, RNPC1, CCNL1, CENPH, BRSK1, MCM8, CCNB3, MCMDC1, AATF, AKT1, ALOX12, ANXA1, ANXA4, API5, ATF5, AVEN, AZU1, BAG1, BCL2L1, BFAR, CFLAR, IL2, MALT1, MCL1, MKL1, MPO, MTL5, MYBL2, and MYO18A include ones that consist of nucleotide sequences having 70% or higher, 80% or higher, 90% or higher, 95% or higher, or 97% or higher identity to the specific nucleotide sequences mentioned above and encode proteins having functions equivalent to GST-π, ATM, CDC25A, p21, PRKDC, RBBP8, SKP2, MCM10, RNPC1, CCNL1, CENPH, BRSK1, MCM8, CCNB3, MCMDC1, AATF, AKT1, ALOX12, ANXA1, ANXA4, API5, ATF5, AVEN, AZU1, BAG1, BCL2L1, BFAR, CFLAR, IL2, MALT1, MCL1, MKL1, MPO, MTL5, MYBL2, and MYO18A.

[0112] The specific functions of GST-π, ATM, CDC25A, p21, PRKDC, RBBP8, SKP2, MCM10, RNPC1, CCNL1, CENPH, BRSK1, MCM8, CCNB3, MCMDC1, AATF, AKT1, ALOX12, ANXA1, ANXA4, API5, ATF5, AVEN, AZU1, BAG1, BCL2L1, BFAR, CFLAR, IL2, MALT1, MCL1, MKL1, MPO, MTL5, MYBL2, and MYO18A are as mentioned above.

[0113] In the present specification, the phrases such as “as used herein”, “used herein”, “in the present specification”, and “described herein” mean that the description subsequent thereto is applied to all aspects of the invention described in the present specification, unless otherwise specified. Also, all technical terms and scientific terms used herein have the same meanings as those commonly understood by those skilled in the art unless otherwise defined. All patents, bulletins, and other publications cited herein are incorporated herein by reference in their entirety.

[0114] The “drug inhibiting GST-π” used herein is not limited and includes, for example, drugs inhibiting the production and/or activity of GST-π and drugs promoting the degradation and/or deactivation of GST-π. Examples of the drug inhibiting the production of GST-π include, but are not limited to, RNAi molecules against DNA encoding GST-π, ribozymes, antisense nucleic acids, DNA/RNA chimeric polynucleotides, and vectors for expressing them.

[0115] Alternatively, any compound that acts on GST-π can be used as the drug inhibiting GST-π. An organic compound (an amino acid, a polypeptide or a derivative thereof, a low-molecular-weight compound, a sugar, a high-molecular-weight compound, etc.), an inorganic compound, or the like can be used as such a compound. Also, such a compound may be any of natural and nonnatural substances. Examples of the derivative of the polypeptide include modified polypeptides obtained by adding modifying groups, and variant polypeptides obtained by altering amino acid residues. In addition, such a compound may be a single compound or may be a compound library, an expression product of a gene library, a cell extract, a cell culture supernatant, a product by a fermentation microorganism, a marine organism extract, a plant extract, or the like. That is, the “drug inhibiting GST-π” is not limited to nucleic acids such as RNAi molecules and includes any compound.

[0116] Specifically, examples of the drug inhibiting the activity of GST-π include, but are not limited to, substances binding to GST-π, for example, glutathione, glutathione analogs (e.g., those described in WO 95/08563, WO 96/40205, WO 99/54346, Non Patent Literature 4, etc.), ketoprofen (Non Patent Literature 2), indomethacin (Hall et al., Cancer Res. 1989; 49 (22): 6265-8), ethacrynic acid, piriprost (Tew et al., Cancer Res. 1988; 48 (13): 3622-5), anti-GST-π antibodies, and dominant negative mutants of GST-π. These drugs are commercially available or can be appropriately produced on the basis of publicly known techniques.

[0117] RNAi molecules against DNA encoding GST-π, ribozymes, antisense nucleic acids, DNA/RNA chimeric polynucleotides, and vectors for expressing them are preferable as the drug inhibiting the production or activity of GST-π because of high specificity and a low possibility of adverse reactions.

[0118] The inhibition of GST-π can be determined when the expression or activity of GST-π in the cell is inhibited as compared with the case the GST-π-inhibiting agent is not allowed to act thereon. The expression of GST-π can be evaluated without limitations by a known arbitrary approach, for example, an immunoprecipitation method using an anti-GST-π antibody, EIA, ELISA, IRA, IRMA, Western blotting, an immunohistochemical method, an immunocytochemical method, flow cytometry, or various hybridization methods, Northern blotting, Southern blotting, or various PCR methods which employ nucleic acids specifically hybridizing to a nucleic acid encoding GST-π or a unique fragment thereof, or a transcript (e.g., mRNA) or a splicing product of the nucleic acid.

[0119] Also, the activity of GST-π can be evaluated without limitations by analyzing the known activity of GST-π, for example, binding activity against a protein such as Raf-1 (particularly, phosphorylated Raf-1) or EGFR (particularly, phosphorylated EGFR) by a known arbitrary method, for example, an immunoprecipitation method, Western blotting, mass spectrometry, a pull-down method, or a surface plasmon resonance (SPR) method.

[0120] The “drug inhibiting a homeostasis-related protein that exhibits synthetic lethality when inhibited together with GST-π” used herein is not limited and includes, for example, drugs inhibiting the production and/or activity of the protein and drugs promoting the degradation and/or deactivation of the protein. Examples of the drug inhibiting the production of the protein include, but are not limited to, RNAi molecules against DNA encoding the homeostasis-related protein, ribozymes, antisense nucleic acids, DNA/RNA chimeric polynucleotides, and vectors for expressing them. Alternatively, any compound that acts on the protein can be used as the drug inhibiting the activity of the homeostasis-related protein or the drug promoting the degradation and/or deactivation of the homeostasis-related protein. An organic compound (an amino acid, a polypeptide or a derivative thereof, a low-molecular-weight compound, a sugar, a high-molecular-weight compound, etc.), an inorganic compound, or the like can be used as such a compound. Also, such a compound may be any of natural and nonnatural substances. Examples of the derivative of the polypeptide include modified polypeptides obtained by adding modifying groups, and variant polypeptides obtained by altering amino acid residues. In addition, such a compound may be a single compound or may be a compound library, an expression product of a gene library, a cell extract, a cell culture supernatant, a product by a fermentation microorganism, a marine organism extract, a plant extract, or the like. That is, the “drug inhibiting a homeostasis-related protein that exhibits synthetic lethality when inhibited together with GST-π” is not limited to nucleic acids such as RNAi molecules and includes any compound.

[0121] More specifically, examples of the drug inhibiting the activity of p21 among the cell cycle-regulating proteins that exhibit synthetic lethality when inhibited together with GST-π include, but are not limited to: butyrolactone I (Sax et al., Cell Cycle, January; 1 (1): 90-6, 2002), which is a low-molecular-weight compound promoting the proteasomal degradation of the p21 protein while also inhibiting the enzymatic activity of CDC2, CDK2, and CDK5; quetiapine (Kondo et al., Transl. Psychiatry, April 2; 3: e243, 2013), which is a psychotropic drug reportedly specifically inhibiting the expression of p21 in the nerve cells or oligodendrocytes of CD-1 mice; Sorafenib (Inoue et al., Cancer Biology & Therapy, 12: 9, 827-836, 2011), which is a low-molecular-weight compound specifically inhibiting p21 without the involvement of p53, p27, or Akt and inhibiting multikinase for Raf, VEGFR, PDGFR, and the like; UC2288 (Wettersten et al., Cancer Biology & Therapy, 14 (3), 278-285, 2013), which is a low-molecular-weight compound specifically inhibiting p21 without the involvement of p53 or Akt; and RNAi molecules against DNA encoding p21, ribozymes, antisense nucleic acids, DNA/RNA chimeric polynucleotides, and vectors for expressing them, anti-p21 antibodies, and dominant negative variants of p21. These drugs are commercially available or can be appropriately produced on the basis of publicly known techniques.

[0122] Examples of the drug inhibiting the activity of RNPC1 among the cell cycle-regulating proteins that exhibit synthetic lethality when inhibited together with GST-π include, but are not limited to, RNAi molecules against DNA encoding RNPC1, ribozymes, antisense nucleic acids, DNA/RNA chimeric polynucleotides, and vectors for expressing them, anti-RNPC1 antibodies, and dominant negative variants of RNPC1. These drugs are commercially available or can be appropriately produced on the basis of publicly known techniques.

[0123] Examples of the drug inhibiting the activity of CCNL1 among the cell cycle-regulating proteins that exhibit synthetic lethality when inhibited together with GST-π include, but are not limited to, RNAi molecules against DNA encoding CCNL1, ribozymes, antisense nucleic acids, DNA/RNA chimeric polynucleotides, and vectors for expressing them, anti-CCNL1 antibodies, and dominant negative variants of CCNL1. These drugs are commercially available or can be appropriately produced on the basis of publicly known techniques.

[0124] Examples of the drug inhibiting the activity of MCM8 among the cell cycle-regulating proteins that exhibit synthetic lethality when inhibited together with GST-π include, but are not limited to, RNAi molecules against DNA encoding MCM8, ribozymes, antisense nucleic acids, DNA/RNA chimeric polynucleotides, and vectors for expressing them, anti-MCM8 antibodies, and dominant negative variants of MCM8. These drugs are commercially available or can be appropriately produced on the basis of publicly known techniques.

[0125] Examples of the drug inhibiting the activity of CCNB3 among the cell cycle-regulating proteins that exhibit synthetic lethality when inhibited together with GST-π include, but are not limited to, RNAi molecules against DNA encoding CCNB3, ribozymes, antisense nucleic acids, DNA/RNA chimeric polynucleotides, and vectors for expressing them, anti-CCNB3 antibodies, and dominant negative variants of CCNB3. These drugs are commercially available or can be appropriately produced on the basis of publicly known techniques.

[0126] Examples of the drug inhibiting the activity of MCMDC1 among the cell cycle-regulating proteins that exhibit synthetic lethality when inhibited together with GST-π include, but are not limited to, RNAi molecules against DNA encoding MCMDC1, ribozymes, antisense nucleic acids, DNA/RNA chimeric polynucleotides, and vectors for expressing them, anti-MCMDC1 antibodies, and dominant negative variants of MCMDC1. These drugs are commercially available or can be appropriately produced on the basis of publicly known techniques.

[0127] Examples of the drug inhibiting the activity of ATM among the cell cycle-regulating proteins that exhibit synthetic lethality when inhibited together with GST-π include, but are not limited to: CGK 733 (Won et al., Nat. Chem. Biol. 2, 369, 2006), which is a low-molecular-weight compound selectively inhibiting the kinase activity of ATM and ATR; KU-55933 (Lau et al., Nat. Cell Biol. 7, 493, 2005), KU-60019 (Zirkin et al., J Biol Chem. July 26; 288 (30): 21770-83, 2013), and CP-466722 (Rainey et al., Cancer Res. September 15; 68 (18):7466-74, 2008), which are low-molecular-weight compounds selectively inhibiting the kinase activity of ATM; and RNAi molecules against DNA encoding ATM, ribozymes, antisense nucleic acids, DNA/RNA chimeric polynucleotides, and vectors for expressing them, anti-ATM antibodies, and dominant negative variants of ATM. These drugs are commercially available or can be appropriately produced on the basis of publicly known techniques.

[0128] Examples of the drug inhibiting the activity of CDC25A among the cell cycle-regulating proteins that exhibit synthetic lethality when inhibited together with GST-π include, but are not limited to: NSC95397 (Lazo J S et al., Mol. Pharmacol. 61: 720-728, 2002), which is a low-molecular-weight compound inhibiting the phosphatase activity of each of human CDC25A, human CDC25B, and human CDC25C; SC alpha alpha delta 09 (Rice, R. L. et al., Biochemistry 36 (50): 15965-15974, 1997), which is a low-molecular-weight compound inhibiting the phosphatase activity of each of human CDC25A, human CDC25B, human CDC25C, and human tyrosine phosphatase PTB1B; and RNAi molecules against DNA encoding CDC25A, ribozymes, antisense nucleic acids, DNA/RNA chimeric polynucleotides, and vectors for expressing them, anti-CDC25A antibodies, and dominant negative variants of CDC25A. These drugs are commercially available or can be appropriately produced on the basis of publicly known techniques.

[0129] Examples of the drug inhibiting the activity of PRKDC among the cell cycle-regulating proteins that exhibit synthetic lethality when inhibited together with GST-π include, but are not limited to, RNAi molecules against DNA encoding PRKDC, ribozymes, antisense nucleic acids, DNA/RNA chimeric polynucleotides, and vectors for expressing them, anti-PRKDC antibodies, and dominant negative variants of PRKDC. These drugs are commercially available or can be appropriately produced on the basis of publicly known techniques.

[0130] Examples of the drug inhibiting the activity of RBBP8 among the cell cycle-regulating proteins that exhibit synthetic lethality when inhibited together with GST-π include, but are not limited to, RNAi molecules against DNA encoding RBBP8, ribozymes, antisense nucleic acids, DNA/RNA chimeric polynucleotides, and vectors for expressing them, anti-RBBP8 antibodies, and dominant negative variants of RBBP8. These drugs are commercially available or can be appropriately produced on the basis of publicly known techniques.

[0131] Examples of the drug inhibiting the activity of SKP2 among the cell cycle-regulating proteins that exhibit synthetic lethality when inhibited together with GST-π include, but are not limited to, RNAi molecules against DNA encoding SKP2, ribozymes, antisense nucleic acids, DNA/RNA chimeric polynucleotides, and vectors for expressing them, anti-SKP2 antibodies, and dominant negative variants of SKP2. These drugs are commercially available or can be appropriately produced on the basis of publicly known techniques.

[0132] Examples of the drug inhibiting the activity of MCM10 among the cell cycle-regulating proteins that exhibit synthetic lethality when inhibited together with GST-π include, but are not limited to, RNAi molecules against DNA encoding MCM10, ribozymes, antisense nucleic acids, DNA/RNA chimeric polynucleotides, and vectors for expressing them, anti-MCM10 antibodies, and dominant negative variants of MCM10. These drugs are commercially available or can be appropriately produced on the basis of publicly known techniques.

[0133] Examples of the drug inhibiting the activity of CENPH among the cell cycle-regulating proteins that exhibit synthetic lethality when inhibited together with GST-π include, but are not limited to, RNAi molecules against DNA encoding CENPH, ribozymes, antisense nucleic acids, DNA/RNA chimeric polynucleotides, and vectors for expressing them, anti-CENPH antibodies, and dominant negative variants of CENPH. These drugs are commercially available or can be appropriately produced on the basis of publicly known techniques.

[0134] Examples of the drug inhibiting the activity of BRSK1 among the cell cycle-regulating proteins that exhibit synthetic lethality when inhibited together with GST-π include, but are not limited to, RNAi molecules against DNA encoding BRSK1, ribozymes, antisense nucleic acids, DNA/RNA chimeric polynucleotides, and vectors for expressing them, anti-BRSK1 antibodies, and dominant negative variants of BRSK1. These drugs are commercially available or can be appropriately produced on the basis of publicly known techniques.

[0135] On the other hand, examples of the drug inhibiting the activity of AATF among the anti-apoptosis-related proteins that exhibit synthetic lethality when inhibited together with GST-π include, but are not limited to, RNAi molecules against DNA encoding AATF, ribozymes, antisense nucleic acids, DNA/RNA chimeric polynucleotides, and vectors for expressing them, anti-AATF antibodies, and dominant negative variants of AATF. These drugs are commercially available or can be appropriately produced on the basis of publicly known techniques.

[0136] Examples of the drug inhibiting the activity of AKT1 among the anti-apoptosis-related proteins that exhibit synthetic lethality when inhibited together with GST-π include, but are not limited to, RNAi molecules against DNA encoding AKT1, ribozymes, antisense nucleic acids, DNA/RNA chimeric polynucleotides, and vectors for expressing them, anti-AKT1 antibodies, and dominant negative variants of AKT1. These drugs are commercially available or can be appropriately produced on the basis of publicly known techniques.

[0137] Examples of the drug inhibiting the activity of ALOX12 among the anti-apoptosis-related proteins that exhibit synthetic lethality when inhibited together with GST-π include, but are not limited to, RNAi molecules against DNA encoding ALOX12, ribozymes, antisense nucleic acids, DNA/RNA chimeric polynucleotides, and vectors for expressing them, anti-ALOX12 antibodies, and dominant negative variants of ALOX12. These drugs are commercially available or can be appropriately produced on the basis of publicly known techniques.

[0138] Examples of the drug inhibiting the activity of ANXA1 among the anti-apoptosis-related proteins that exhibit synthetic lethality when inhibited together with GST-π include, but are not limited to, RNAi molecules against DNA encoding ANXA1, ribozymes, antisense nucleic acids, DNA/RNA chimeric polynucleotides, and vectors for expressing them, anti-ANXA1 antibodies, and dominant negative variants of ANXA1. These drugs are commercially available or can be appropriately produced on the basis of publicly known techniques.

[0139] Examples of the drug inhibiting the activity of ANXA4 among the anti-apoptosis-related proteins that exhibit synthetic lethality when inhibited together with GST-π include, but are not limited to, RNAi molecules against DNA encoding ANXA4, ribozymes, antisense nucleic acids, DNA/RNA chimeric polynucleotides, and vectors for expressing them, anti-ANXA4 antibodies, and dominant negative variants of ANXA4. These drugs are commercially available or can be appropriately produced on the basis of publicly known techniques.

[0140] Examples of the drug inhibiting the activity of API5 among the anti-apoptosis-related proteins that exhibit synthetic lethality when inhibited together with GST-π include, but are not limited to, RNAi molecules against DNA encoding API5, ribozymes, antisense nucleic acids, DNA/RNA chimeric polynucleotides, and vectors for expressing them, anti-API5 antibodies, and dominant negative variants of API5. These drugs are commercially available or can be appropriately produced on the basis of publicly known techniques.

[0141] Examples of the drug inhibiting the activity of ATF5 among the anti-apoptosis-related proteins that exhibit synthetic lethality when inhibited together with GST-π include, but are not limited to, RNAi molecules against DNA encoding ATF5, ribozymes, antisense nucleic acids, DNA/RNA chimeric polynucleotides, and vectors for expressing them, anti-ATF5 antibodies, and dominant negative variants of ATF5. These drugs are commercially available or can be appropriately produced on the basis of publicly known techniques.

[0142] Examples of the drug inhibiting the activity of AVEN among the anti-apoptosis-related proteins that exhibit synthetic lethality when inhibited together with GST-π include, but are not limited to, RNAi molecules against DNA encoding AVEN, ribozymes, antisense nucleic acids, DNA/RNA chimeric polynucleotides, and vectors for expressing them, anti-AVEN antibodies, and dominant negative variants of AVEN. These drugs are commercially available or can be appropriately produced on the basis of publicly known techniques.

[0143] Examples of the drug inhibiting the activity of AZU1 among the anti-apoptosis-related proteins that exhibit synthetic lethality when inhibited together with GST-π include, but are not limited to, RNAi molecules against DNA encoding AZU1, ribozymes, antisense nucleic acids, DNA/RNA chimeric polynucleotides, and vectors for expressing them, anti-AZU1 antibodies, and dominant negative variants of AZU1. These drugs are commercially available or can be appropriately produced on the basis of publicly known techniques.

[0144] Examples of the drug inhibiting the activity of BAG1 among the anti-apoptosis-related proteins that exhibit synthetic lethality when inhibited together with GST-π include, but are not limited to, RNAi molecules against DNA encoding BAG1, ribozymes, antisense nucleic acids, DNA/RNA chimeric polynucleotides, and vectors for expressing them, anti-BAG1 antibodies, and dominant negative variants of BAG1. These drugs are commercially available or can be appropriately produced on the basis of publicly known techniques.

[0145] Examples of the drug inhibiting the activity of BCL2L1 among the anti-apoptosis-related proteins that exhibit synthetic lethality when inhibited together with GST-π include, but are not limited to, RNAi molecules against DNA encoding BCL2L1, ribozymes, antisense nucleic acids, DNA/RNA chimeric polynucleotides, and vectors for expressing them, anti-BCL2L1 antibodies, and dominant negative variants of BCL2L1. These drugs are commercially available or can be appropriately produced on the basis of publicly known techniques.

[0146] Examples of the drug inhibiting the activity of BFAR among the anti-apoptosis-related proteins that exhibit synthetic lethality when inhibited together with GST-π include, but are not limited to, RNAi molecules against DNA encoding BFAR, ribozymes, antisense nucleic acids, DNA/RNA chimeric polynucleotides, and vectors for expressing them, anti-BFAR antibodies, and dominant negative variants of BFAR. These drugs are commercially available or can be appropriately produced on the basis of publicly known techniques.

[0147] Examples of the drug inhibiting the activity of CFLAR among the anti-apoptosis-related proteins that exhibit synthetic lethality when inhibited together with GST-π include, but are not limited to, RNAi molecules against DNA encoding CFLAR, ribozymes, antisense nucleic acids, DNA/RNA chimeric polynucleotides, and vectors for expressing them, anti-CFLAR antibodies, and dominant negative variants of CFLAR. These drugs are commercially available or can be appropriately produced on the basis of publicly known techniques.

[0148] Examples of the drug inhibiting the activity of IL2 among the anti-apoptosis-related proteins that exhibit synthetic lethality when inhibited together with GST-π include, but are not limited to, RNAi molecules against DNA encoding IL2, ribozymes, antisense nucleic acids, DNA/RNA chimeric polynucleotides, and vectors for expressing them, anti-IL2 antibodies, and dominant negative variants of IL2. These drugs are commercially available or can be appropriately produced on the basis of publicly known techniques.

[0149] Examples of the drug inhibiting the activity of MALT1 among the anti-apoptosis-related proteins that exhibit synthetic lethality when inhibited together with GST-π include, but are not limited to, RNAi molecules against DNA encoding MALT1, ribozymes, antisense nucleic acids, DNA/RNA chimeric polynucleotides, and vectors for expressing them, anti-MALT1 antibodies, and dominant negative variants of MALT1. These drugs are commercially available or can be appropriately produced on the basis of publicly known techniques.

[0150] Examples of the drug inhibiting the activity of MCL1 among the anti-apoptosis-related proteins that exhibit synthetic lethality when inhibited together with GST-π include, but are not limited to, Synribo (omacetaxine mepesuccinate), which is approved as a therapeutic agent for chronic myelocytic leukemia, RNAi molecules against DNA encoding MCL1, ribozymes, antisense nucleic acids, DNA/RNA chimeric polynucleotides, and vectors for expressing them, anti-MCL1 antibodies, and dominant negative variants of MCL1. These drugs are commercially available or can be appropriately produced on the basis of publicly known techniques.

[0151] Examples of the drug inhibiting the activity of MKL1 among the anti-apoptosis-related proteins that exhibit synthetic lethality when inhibited together with GST-π include, but are not limited to, RNAi molecules against DNA encoding MKL1, ribozymes, antisense nucleic acids, DNA/RNA chimeric polynucleotides, and vectors for expressing them, anti-MKL1 antibodies, and dominant negative variants of MKL1. These drugs are commercially available or can be appropriately produced on the basis of publicly known techniques.

[0152] Examples of the drug inhibiting the activity of MPO among the anti-apoptosis-related proteins that exhibit synthetic lethality when inhibited together with GST-π include, but are not limited to, RNAi molecules against DNA encoding MPO, ribozymes, antisense nucleic acids, DNA/RNA chimeric polynucleotides, and vectors for expressing them, anti-MPO antibodies, and dominant negative variants of MPO. These drugs are commercially available or can be appropriately produced on the basis of publicly known techniques.

[0153] Examples of the drug inhibiting the activity of MTL5 among the anti-apoptosis-related proteins that exhibit synthetic lethality when inhibited together with GST-π include, but are not limited to, RNAi molecules against DNA encoding MTL5, ribozymes, antisense nucleic acids, DNA/RNA chimeric polynucleotides, and vectors for expressing them, anti-MTL5 antibodies, and dominant negative variants of MTL5. These drugs are commercially available or can be appropriately produced on the basis of publicly known techniques.

[0154] Examples of the drug inhibiting the activity of MYBL2 among the anti-apoptosis-related proteins that exhibit synthetic lethality when inhibited together with GST-π include, but are not limited to, RNAi molecules against DNA encoding MYBL2, ribozymes, antisense nucleic acids, DNA/RNA chimeric polynucleotides, and vectors for expressing them, anti-MYBL2 antibodies, and dominant negative variants of MYBL2. These drugs are commercially available or can be appropriately produced on the basis of publicly known techniques.

[0155] Examples of the drug inhibiting the activity of MYO18A among the anti-apoptosis-related proteins that exhibit synthetic lethality when inhibited together with GST-π include, but are not limited to, RNAi molecules against DNA encoding MYO18A, ribozymes, antisense nucleic acids, DNA/RNA chimeric polynucleotides, and vectors for expressing them, anti-MYO18A antibodies, and dominant negative variants of MYO18A. These drugs are commercially available or can be appropriately produced on the basis of publicly known techniques.

[0156] Particularly, RNAi molecules against DNA encoding the protein, ribozymes, antisense nucleic acids, DNA/RNA chimeric polynucleotides, and vectors for expressing them are preferable as the drug inhibiting the production or activity of the cell cycle-regulating protein (e.g., p21) or anti-apoptosis-related protein that exhibits synthetic lethality when inhibited together with GST-π, because of high specificity and a low possibility of adverse reactions.

[0157] The inhibition of the homeostasis-related protein can be determined when the expression or activity of the protein in the cell is inhibited as compared with the case the agent inhibiting the protein is not allowed to act thereon. The expression of the protein can be evaluated without limitations by a known arbitrary approach, for example, an immunoprecipitation method using an antibody, EIA, ELISA, IRA, IRMA, Western blotting, an immunohistochemical method, an immunocytochemical method, flow cytometry, or various hybridization methods, Northern blotting, Southern blotting, or various PCR methods which employ nucleic acids specifically hybridizing to a nucleic acid encoding the protein or a unique fragment thereof, or a transcript (e.g., mRNA) or a splicing product of the nucleic acid.

[0158] Also, the activity of, for example, p21 can be evaluated without limitations by analyzing the known activity of p21, for example, binding activity against cyclin-CDK2 or a cyclin-CDK1 complex by a known arbitrary method, for example, an immunoprecipitation method, Western blotting, mass spectrometry, a pull-down method, or a surface plasmon resonance (SPR) method.

[0159] As used herein, the RNAi molecule refers to an arbitrary molecule that brings about RNA interference. The RNAi molecule is not limited and includes double-stranded RNAs such as siRNA (small interfering RNA), miRNA (micro RNA), shRNA (short hairpin RNA), ddRNA (DNA-directed RNA), piRNA (Piwi-interacting RNA), rasiRNA (repeat associated siRNA), and alternatives thereof, and the like. These RNAi molecules are commercially available or may be designed and prepared on the basis of publicly known sequence information, i.e., the nucleotide sequences and/or amino acid sequences shown in SEQ ID NOs: 1 to 30, 39 to 80.

[0160] As used herein, the antisense nucleic acid includes RNA, DNA, PNA, or complexes thereof.

[0161] As used herein, the DNA/RNA chimeric polynucleotide is not limited and includes, for example, a double-stranded polynucleotide described in JP Patent Publication (Kokai) No. 2003-219893 A (2003) which consists of DNA and RNA and inhibits the expression of a target gene.

[0162] The drug inhibiting GST-π and the drug inhibiting a homeostasis-related protein that exhibits synthetic lethality when inhibited together with GST-π may be contained in a single preparation or may be separately contained in two or more preparations. In the latter case, these preparations may be administered at the same time or may be administered in a staggered manner. In the case of administration in a staggered manner, the preparation containing the drug inhibiting GST-π may be administered before or after the administration of the preparation containing the drug inhibiting a homeostasis-related protein that exhibits synthetic lethality when inhibited together with GST-π.

[0163] The cell death-inducing agent and the cell growth-inhibiting agent according to the present invention may comprise one type of the aforementioned homeostasis-related protein, or two or more types the aforementioned homeostasis-related protein. For example, two or more types of cell cycle-regulating protein; two or more types of anti-apoptosis-related proteins; or one or more types of cell cycle-regulating proteins and one or more types of anti-apoptosis-related proteins may be used as homeostasis-related proteins included in the cell death-inducing agent and the cell growth-inhibiting agent according to the present invention.

[0164] Incidentally, ATM, CDC25A, p21, PRKDC, RBBP8, SKP2, MCM10, RNPC1, CCNL1, CENPH, BRSK1, MCM8, CCNB3, MCMDC1, AATF, AKT1, ALOX12, ANXA1, ANXA4, API5, ATF5, AVEN, AZU1, BAG1, BCL2L1, BFAR, CFLAR, IL2, MALT1, MCL1, MKL1, MPO, MTL5, MYBL2, and MYO18A are each a homeostasis-related protein that exhibits synthetic lethality for a cancer cell when inhibited together with GST-π. Accordingly, the drug inhibiting the protein serves as an active ingredient for an agent or a composition which potentiates the induction of cell death and/or the inhibition of cell growth by the drug inhibiting GST-π (hereinafter, also referred to as a “cell death induction-potentiating agent”, a “cell growth inhibition-potentiating agent”, a “composition for the potentiation of cell death induction”, or a “composition for the potentiation of cell growth inhibition”). In other words, the induction of cell death and/or the inhibition of cell growth by the administration of the drug inhibiting GST-π can be potentiated by administering an effective amount of the drug inhibiting the protein.

[0165] The content of the active ingredient in the agent or the composition of the present invention may be an amount that induces cell death such as apoptosis and/or inhibits cell growth when the agent or the composition is administered. Also, an amount that does not have adverse effect exceeding advantages brought about by administration is preferable. Such an amount is publicly known or can be appropriately determined by an in vitro test using cultured cells or the like or by a test in model animals such as mice, rats, dogs, or pigs. Such a testing method is well known to those skilled in the art. The induction of apoptosis can be evaluated by various known approaches, for example, the detection of apoptosis-specific phenomena such as DNA fragmentation, binding of annexin V to a cell membrane, change in mitochondrial membrane potential, and activation of caspase, and TUNEL staining. Also, the inhibition of cell growth can be evaluated by various known approaches, for example, the time-dependent measurement of the number of live cells, the measurement of the size, volume, or weight of tumor, the measurement of the amount of DNA synthesized, a WST-1 method, a BrdU (bromodeoxyuridine) method, and a 3H thymidine incorporation method. The content of the active ingredient can vary depending on the dosage form of the agent or the composition. For example, in the case of using a plurality of units of compositions in one administration, the amount of the active ingredient contained in one composition unit can be set to 1/a plurality of amounts of the active ingredient necessary for one administration. Such adjustment of the content can be appropriately carried out by those skilled in the art.

[0166] Moreover, the drug inhibiting GST-π and the drug inhibiting a homeostasis-related protein that exhibits synthetic lethality when inhibited together with GST-π can be formulated as active ingredients to thereby produce a cell death-inducing agent, a cell growth-inhibiting agent, a composition for cell death induction, or a composition for cell growth inhibition.

[0167] Furthermore, a combination of the drug inhibiting GST-π and the drug inhibiting a homeostasis-related protein that exhibits synthetic lethality when inhibited together with GST-π for use in cell death induction or cell growth inhibition can be provided. In addition, a method for inducing cell death or a method for inhibiting cell growth, comprising administering effective amounts of the drug inhibiting GST-π and the drug inhibiting a homeostasis-related protein that exhibits synthetic lethality when inhibited together with GST-π can be provided.

[0168] All of the aforementioned methods for inducing cell death such as apoptosis or inhibiting cell growth may be in vitro methods or may be in vivo methods. The drugs for these methods are as already mentioned above, and the effective amount of each drug may be an amount that induces cell death such as apoptosis and/or inhibits cell growth in the recipient cell. Also, an amount that does not have adverse effect exceeding advantages brought about by administration is preferable. Such an amount is publicly known or can be appropriately determined by an in vitro test using cultured cells. Such a testing method is well known to those skilled in the art. The induction of cell death or the inhibition of cell growth can be evaluated by various known approaches including those mentioned above. When the drug is administered to a predetermined cancer cell population, the effective amount does not have to bring about cell death or growth inhibition for all cells in this cell population. The effective amount may be, for example, an amount that brings about apoptosis or growth inhibition for 1% or more, 2% or more, 3% or more, 4% or more, 5% or more, 6% or more, 8% or more, 10% or more, 12% or more, 15% or more, 20% or more, and 25% or more of the cells in the cell population.

[0169] The cell death-inducing agent or the cell growth-inhibiting agent of the present invention can effectively induce cell death or inhibit cell growth even for a cancer cell and as such, is effective as an ingredient for a pharmaceutical composition for a disease caused by abnormal cell growth. Also, the drug inhibiting GST-π and the drug inhibiting a homeostasis-related protein that exhibits synthetic lethality when inhibited together with GST-π can be formulated as active ingredients to thereby produce a pharmaceutical composition for a disease caused by abnormal cell growth. Furthermore, the treatment or therapy of a disease caused by abnormal cell growth, comprising administering an effective amount of the produced pharmaceutical composition to a subject in need thereof can be provided.

[0170] The pharmaceutical composition is effective for treating a disease caused by abnormal cell growth, particularly, for treating a disease having cell death or abnormal cell growth by expressing mutated KRAS.

[0171] The disease caused by a cell expressing mutated KRAS is not limited and includes, for example, benign or malignant tumors (also referred to as cancers or malignant neoplasms), hyperplasia, keloid, Cushing syndrome, primary aldosteronism, erythroplakia, polycythemia vera, leukoplakia, hyperplastic scar, lichen planus, and lentiginosis.

[0172] Examples of the cancer according to the present invention include cancers, cancers highly expressing GST-π, and cancers caused by cells expressing mutated KRAS (also simply referred to as KRAS cancers). In many cases, the KRAS cancers are included in the cancers highly expressing GST-π. Examples thereof include, but are not limited to: sarcomas such as fibrosarcoma, malignant fibrous histiocytoma, liposarcoma, rhabdomyosarcoma, leiomyosarcoma, angiosarcoma, Kaposi's sarcoma, lymphangiosarcoma, synovial sarcoma, chondrosarcoma, and osteosarcoma; carcinomas such as brain tumor, head and neck cancer, breast cancer, lung cancer, esophageal cancer, stomach cancer, duodenal cancer, appendix cancer colorectal cancer, rectal cancer, liver cancer, pancreatic cancer, gallbladder cancer, bile duct cancer, anus cancer, kidney cancer, urethral cancer, urinary bladder cancer, prostate cancer, penis cancer, testis cancer, uterine cancer, ovary cancer, vulval cancer, vaginal cancer, and skin cancer; and leukemia and malignant lymphoma. In the present invention, the “cancer” includes epithelial malignant tumors and non-epithelial malignant tumors. The cancer according to the present invention may be present in an arbitrary site of the body, for example, the brain, the head and neck region, the chest, the extremities, the lung, the heart, thymus glands, the esophagus, the stomach, the small intestine (duodenum, jejunum, and ileum), the large intestine (colon, cecum, appendix, and rectum), the liver, the pancreas, the gallbladder, the anus, the kidney, urinary ducts, the urinary bladder, the prostate, the penis, the testis, the uterus, the ovary, the vulva, the vagina, the skin, striated muscles, smooth muscles, synovial membranes, cartilage, bone, thyroid glands, adrenal glands, the peritoneum, the mesenterium, bone marrow, blood, the vascular system, the lymphatic system such as lymph nodes, or lymph.

[0173] For the pharmaceutical composition, the drug inhibiting GST-π and the drug inhibiting a homeostasis-related protein that exhibits synthetic lethality when inhibited together with GST-π may be used in combination with an additional active ingredient. In this context, the use in combination includes, for example, the administration of the additional active ingredient as another preparation, and the administration of the additional active ingredient as a combination drug with at least one of the other drugs. In the case of administration as another preparation, the preparation containing the additional active ingredient may be administered before, at the same time with, or after the administration of the other preparation(s).

[0174] Examples of such an additional active ingredient include ones effective for the treatment of the disease of interest. For example, when the disease to be treated is a cancer, an anticancer agent can be used in combination therewith. Examples of the anticancer agent can include: alkylating agents such as ifosfamide, nimustine hydrochloride, cyclophosphamide, dacarbazine, melphalan, and ranimustine; metabolic antagonists such as gemcitabine hydrochloride, enocitabine, cytarabine ocfosfate, cytarabine preparations, tegafur uracil, tegafur-gimeracil-oteracil potassium combination drugs (e.g., TS-1), doxifluridine, hydroxycarbamide, fluorouracil, methotrexate, and mercaptopurine; antitumor antibiotics such as idarubicin hydrochloride, epirubicin hydrochloride, daunorubicin hydrochloride, daunorubicin citrate, doxorubicin hydrochloride, pirarubicin hydrochloride, bleomycin hydrochloride, peplomycin sulfate, mitoxantrone hydrochloride, and mitomycin C; alkaloids such as etoposide, irinotecan hydrochloride, vinorelbine tartrate, docetaxel hydrate, paclitaxel, vincristine sulfate, vindesine sulfate, and vinblastine sulfate; hormone therapy agents such as anastrozole, tamoxifen citrate, toremifene citrate, bicalutamide, flutamide, and estramustine phosphate; platinum complexes such as carboplatin, cisplatin (CDDP), and nedaplatin; anti-angiogenic agents such as thalidomide, Neovastat, and bevacizumab; and L-asparaginase.

[0175] When the active ingredients in various agents or compositions, the method of treating a subject, etc., of the present invention described herein are nucleic acids, for example, RNAi molecules, ribozymes, antisense nucleic acids, or DNA/RNA chimeric polynucleotides, they may be used directly as naked nucleic acids or may be supported by various vectors. Publicly known arbitrary vectors such as plasmid vectors, phage vectors, phagemid vectors, cosmid vectors, or virus vectors can be used as the vectors. It is preferable that the vectors should contain at least a promoter that potentiates the expression of each nucleic acid to be carried. In this case, it is preferable that the nucleic acid should be operably linked to such a promoter. The nucleic acid operably linked to the promoter means that the nucleic acid and the promoter are located such that the protein encoded by the nucleic acid is properly produced by the action of the promoter. The vectors may or may not be replicable in host cells. Also, the transcription of the gene may be performed outside the nuclei of the host cells or may be performed inside the nuclei thereof. In the latter case, the nucleic acid may be integrated into the genomes of the host cells.

[0176] Alternatively, the active ingredients may be supported by various non-viral lipid or protein carriers. Examples of such carriers include, but are not limited to, cholesterols, liposomes, antibody protomers, cyclodextrin nanoparticles, fusion peptides, aptamers, biodegradable polylactic acid copolymers, and polymers, which can enhance the efficiency of cellular uptake (see e.g., Pirollo and Chang, Cancer Res. 2008; 68 (5): 1247-50). Particularly, cationic liposomes or polymers (e.g., polyethyleneimine) are useful. Further examples of the polymers useful as such carriers include those described in, for example, US 2008/0207553 and US 2008/0312174.

[0177] In various pharmaceutical compositions of the present invention described herein, the active ingredients may be combined with an additional arbitrary ingredient unless the effects of the active ingredients are impaired. Examples of such an arbitrary ingredient include other chemotherapeutic agents, pharmacologically acceptable carriers, excipients, and diluents. Furthermore, the compositions may be coated with suitable materials, for example, enteric coatings or time-controlled disintegrating materials, according to administration routes, drug release manners, etc., and may be incorporated into suitable drug release systems.

[0178] Various agents and compositions (including various pharmaceutical compositions) of the present invention described herein may be administered without limitations through various routes including both oral and parenteral routes, for example, oral, intravenous, intramuscular, subcutaneous, local, intratumoral, rectal, intraarterial, intraportal, intraventricular, transmucosal, percutaneous, nasal, intraperitoneal, intrapulmonary, and intrauterine routes, or may be prepared into dosage forms suitable for each administration route. Arbitrary publicly known ones can be appropriately adopted for such dosage forms and preparation methods (see e.g., Hyoujun Yakuzai Gaku (Standard Pharmaceutics in English), edited by Yoshiteru Watanabe et al., Nankodo Co., Ltd., 2003).

[0179] Examples of the dosage form suitable for oral administration include, but are not limited to, powders, granules, tablets, capsules, solutions, suspensions, emulsions, gels, and syrups. Also, examples of the dosage form suitable for parenteral administration include injections such as injections in a solution state, injections in a suspension state, injections in an emulsion state, and injections of type to be prepared before use. The preparations for parenteral administration can be in the form of an aqueous or nonaqueous isotonic sterile solution or suspension.

[0180] Various agents or compositions (including various pharmaceutical compositions) of the present invention described herein may be prepared to target particular tissues or cells. The targeting can be achieved by a known arbitrary approach. In the case of intending delivery to a cancer, for example, an approach such as passive targeting by setting the size of a preparation to a diameter of 50 to 200 μm, particularly, 75 to 150 μm, suitable for the exertion of EPR (enhanced permeability and retention) effects, or active targeting using a ligand such as CD19, HER2, transferrin receptor, folate receptor, VIP receptor, EGFR (Torchilin, AAPS J. 2007; 9 (2): E128-47), RAAG10 (JP Patent Publication (Kohyo) No. 2005-532050 A (2005)), PIPA (JP Patent Publication (Kohyo) No. 2006-506071 A (2006)), or KID3 (JP Patent Publication (Kohyo) No. 2007-529197 A (2007)), a peptide having an RGD motif or an NGR motif, F3, LyP-1 (Ruoslahti et al., J Cell Biol. 2010; 188 (6): 759-68), or the like as a targeting agent can be used without limitations. Since it is also known that retinoid or a derivative thereof is useful as a targeting agent for a cancer cell (WO 2008/120815), a carrier comprising retinoid as a targeting agent may be used. Such a carrier is described in WO 2009/036368, WO 2010/014117, WO 2012/170952, etc., in addition to the above literature.

[0181] Various agents or compositions (including various pharmaceutical compositions) of the present invention described herein can be supplied in any form and may be provided in a form that can be prepared before use, for example, a form that can be prepared by a physician and/or a pharmacist, a nurse, or other paramedical persons in a medical setting or in the neighborhood thereof, from the viewpoint of preservation stability. Such a form is particularly useful when the agent or the composition of the present invention comprises ingredients difficult to stably preserve, such as lipids, proteins, or nucleic acids. In this case, the agent or the composition of the present invention is provided as one or two or more containers comprising at least one of the components essential therefore, and is prepared before use, for example, within 24 hours before use, preferably within 3 hours before use, more preferably immediately before use. For the preparation, a reagent, a solvent, a prescription instrument, or the like usually available in the preparation location can be appropriately used.

[0182] Thus, the present invention also relates to a composition preparation kit comprising one or two or more containers comprising one or a combination of the active ingredients that may be contained in various agents or compositions of the present invention, and necessary components for various agents or compositions which are provided in the form of such a kit. The kit of the present invention may additionally comprise an instruction, for example, a manual or an electronic recording medium (CD or DVD), describing preparation methods, a method of treating a subject, etc., for various agents or compositions of the present invention. Also, the kit of the present invention may comprise all of the components for completing various agents or compositions of the present invention, but is not necessarily required to comprise all of the components. Thus, the kit of the present invention may not comprise a reagent or a solvent usually available in a medical setting, an experimental facility, or the like, for example, sterile water, saline, or a glucose solution.

[0183] The effective amount for various methods of treating a subject of the present invention described herein is, for example, an amount that reduces the symptoms of a disease or delays or terminates the progression of the disease, and is preferably an amount that inhibits or cures the disease. Also, an amount that does not have adverse effect exceeding advantages brought about by administration is preferable. Such an amount can be appropriately determined by an in vitro test using cultured cells or the like or by a test in model animals such as mice, rats, dogs, or pigs. Such a testing method is well known to those skilled in the art. Furthermore, the doses of the drugs used in the treatment method of the present invention are generally known to those skilled in the art or can be appropriately determined by the aforementioned tests or the like.

[0184] The specific doses of the active ingredients to be administered in the method of treating a subject of the present invention described herein can be determined in consideration of various conditions about a subject in need of treatment, for example, the severity of the symptoms, the general health state of the subject, the age, the body weight, the sex of the subject, diet, the time and frequency of administration, a drug used in combination, response to the therapy, dosage form, and compliance to the therapy.

[0185] The administration route includes various routes including both oral and parenteral routes, for example, oral, intravenous, intramuscular, subcutaneous, local, intratumoral, rectal, intraarterial, intraportal, intraventricular, transmucosal, percutaneous, nasal, intraperitoneal, intrapulmonary, and intrauterine routes.

[0186] The frequency of administration differs depending on the properties of the agent or the composition used, and conditions about the subject including those described above, and may be, for example, multiple times per day (i.e., 2, 3, 4, or 5 times a day), once a day, every few days (i.e., every 2, 3, 4, 5, 6, or 7 days), once a week, or every few weeks (i.e., every 2, 3, or 4 weeks).

[0187] As used herein, the term “subject” means an arbitrary organism individual and is preferably an animal, more preferably a mammal, further preferably a human individual. In the present invention, the subject may be healthy or may have some disease. In the case of intending the treatment of a particular disease, the subject typically means a subject having this disease or having the risk of being affected by this disease.

[0188] As used herein, the term “treatment” includes every type of medically acceptable prophylactic and/or therapeutic intervention aimed at, for example, curing, temporarily ameliorating, or preventing a disease. For example, the term “treatment” encompasses various medically acceptable interventions of interest, including the delay or termination of the progression of a disease, the involution or disappearance of a lesion, the prevention of onset or the prevention of recurrence, etc.

[0189] Incidentally, as mentioned above, ATM, CDC25A, p21, PRKDC, RBBP8, SKP2, MCM10, RNPC1, CCNL1, CENPH, BRSK1, MCM8, CCNB3, MCMDC1, AATF, AKT1, ALOX12, ANXA1, ANXA4, API5, ATF5, AVEN, AZU1, BAG1, BCL2L1, BFAR, CFLAR, IL2, MALT1, MCL1, MKL1, MPO, MTL5, MYBL2, and MYO18A are each a protein that exhibits synthetic lethality for a cancer cell when inhibited together with GST-π. Thus, a cell death-inducing agent and/or a cell growth-inhibiting agent for a cancer cell that is used together with a drug inhibiting GST-π can be screened for by using the inhibition of this homeostasis-related protein as an index. Specifically, a substance that can inhibit the homeostasis-related protein serves as a candidate substance for the cell death-inducing agent and/or the cell growth-inhibiting agent for a cancer cell that is used together with a drug inhibiting GST-π.

[0190] For example, a test substance is contacted with a cell expressing mutated KRAS as one example of the cancer cell, and the expression level of the homeostasis-related protein that exhibits synthetic lethality for the cell expressing mutated KRAS when inhibited together with GST-π is measured in the cell. The test substance can be selected as a candidate substance for a drug inhibiting the homeostasis-related protein, when the expression level measured after the contact of the test substance is decreased compared with the expression level measured in the absence of the test substance.

[0191] On the other hand, the drug inhibiting GST-π is a protein that exhibits synthetic lethality for a cancer cell when inhibited together with the drug inhibiting the homeostasis-related protein that exhibits synthetic lethality for a cancer cell when inhibited together with GST-π. Thus, a cell death-inducing agent and/or a cell growth-inhibiting agent for a cancer cell that is used together with a drug inhibiting the homeostasis-related protein can be screened for by using the inhibition of GST-π as an index. Specifically, a substance that can inhibit GST-π serves as a candidate substance for the cell death-inducing agent and/or the cell growth-inhibiting agent for a cancer cell that is used together with a drug inhibiting the homeostasis-related protein.

[0192] For example, a test substance is contacted with a cell expressing mutated KRAS as one example of the cancer cell, and the expression level of GST-π is measured in the cell. The test substance can be selected as a candidate substance for a drug inhibiting GST-π, when the expression level measured after the contact of the test substance is decreased compared with the expression level measured in the absence of the test substance.

[0193] Likewise, a cell death-inducing agent and/or a cell growth-inhibiting agent for a cancer cell can be screened for by using both of the inhibition of GST-π and the inhibition of the homeostasis-related protein that exhibits synthetic lethality for a cancer cell when inhibited together with GST-π as indexes. Specifically, a substance that can inhibit GST-π and can inhibit the homeostasis-related protein serves as a candidate substance for the cell death-inducing agent and/or the cell growth-inhibiting agent for a cancer cell.

[0194] For example, a test substance is contacted with a cell expressing mutated KRAS as one example of the cancer cell, and the expression level of GST-π and the expression level of the homeostasis-related protein are measured in the cell. The test substance can be selected as a candidate substance for a drug inhibiting GST-π and inhibiting the homeostasis-related protein that exhibits synthetic lethality for a cancer cell when inhibited together with GST-π, when these expression levels measured after the contact of the test substance are both decreased compared with the respective expression levels measured in the absence of the test substance.

[0195] In this context, the test substance is not limited by any means and can be any substance. The test substance may be a single substance or may be a mixture consisting of a plurality of components. The test substance may be configured to comprise an unidentified substance as in, for example, an extract from a microorganism or a culture solution, or may be configured to comprise known compositions at predetermined compositional ratios. Also, the test substance may be any of proteins, nucleic acids, lipids, polysaccharides, organic compounds, and inorganic compounds.

### Sequences

### EXAMPLES

[0196] Hereinafter, the present invention will be described further specifically with reference to Examples. However, the technical scope of the present invention is not intended to be limited by Examples below.

### Experiment 1

### Knockdown of GST-π and P21 by siRNAs

[0197] As examples of cancer cells, 1×10⁵ M7609 cells (human colorectal cancer cells having KRAS mutation) and PANC-1 cells (human pancreatic cancer cells having KRAS mutation) were inoculated to 6 cm Petri dishes and cultured for 18 hours in Roswell Park Memorial Institute 1640 (RPMI 1640, Sigma-Aldrich Corp.) supplemented with 10% fetal bovine serum (FBS) and 0.5% L-glutamine. The culture conditions were 37° C. and 5% CO₂, unless otherwise specified. Moreover, as an example of cancer cells, 0.5×10⁵ A549 cells (human lung cancer cells having KRAS mutation) were inoculated to a 6 cm Petri dish and cultured for 18 hours in a Dulbecco's modified Eagle's medium (DMEM, Sigma-Aldrich Corp.) supplemented with 10% FBS and 1% L-glutamine. Furthermore, as an example of cancer cells, 1×10⁵ MIA PaCa-2 cells (human pancreatic cancer cell having KRAS mutation) were inoculated to a 6 cm Petri dish and cultured for 18 hours in DMEM supplemented with 10% FBS and 1% L-glutamine. Furthermore, as an example of cancer cells, 0.5×10⁵ HCT116 cells (human colorectal cancer cells having KRAS mutation) were inoculated to a 6 cm Petri dish and cultured for 18 hours in McCoy's 5A Medium (McCoy, Sigma-Aldrich Corp.) supplemented with 10% FBS and 0.5% L-glutamine.

[0198] In this experiment, first, the PANC-1, A549, or MIA PaCa-2 cells that became 20 to 30% confluent were transfected with GST-π siRNA and/or P21 siRNA using Lipofectamine RNAi MAX (Life Technologies Corp.) as follows.

[0199] The Lipofectamine/siRNA mixed solution for transfection was prepared as follows: first, a Lipofectamine solution in which 15 μL of Lipofectamine RNAi MAX and 485 μL of OPTI-MEM (Sigma-Aldrich Corp.) were mixed was prepared. Next, an siRNA solution in which a predetermined amount of 50 μM siRNA was adjusted to 500 μL with OPTI-MEM was prepared (e.g., in the case of preparing an siRNA solution used with a final concentration of 50 nM, 6 μL of 50 μM siRNA and 494 μL of OPTI-MEM were mixed), and this was mixed with the aforementioned Lipofectamine solution and left standing at room temperature for 15 minutes. siRNAs given below were used. In the description below, the upper-case letters represent RNAs, and the lower-case letters represent DNAs.

GST-π siRNA:

| | |
|---|---|
| Sense strand: | |
| GGGAGGCAAGACCUUCAUUtt | (SEQ ID NO: 31) |
| Antisense strand: | |
| AAUGAAGGUCUUGCCUCCCtg | (SEQ ID NO: 32) |

P21 siRNA:

| | |
|---|---|
| Sense strand: | |
| UCCUAAGAGUGCUGGGCAUtt | (SEQ ID NO: 33) |
| Antisense strand: | |
| AUGCCCAGCACUCUUAGGAtt | (SEQ ID NO: 34) |

Control siRNA:

| | |
|---|---|
| Sense strand: | |
| ACGUGACACGUUCGGAGAAtt | (SEQ ID NO: 35) |
| Antisense strand: | |
| UUCUCCGAACGUGUCACGUtt | (SEQ ID NO: 36) |

GST-π siRNA-2:

| | |
|---|---|
| Sense strand: | |
| UCUCCCUCAUCUACACCAAtt | (SEQ ID NO: 37) |
| Antisense strand: | |
| UUGGUGUAGAUGAGGGAGAtg | (SEQ ID NO: 38) |

[0200] GST-π siRNA and P21 siRNA each at a final concentration of 50 nM, GST-π siRNA or P21 siRNA at a final concentration of 50 nM (both added with control siRNA at a final concentration of 50 nM), or GST-π siRNA at a final concentration of 100 nM (without the addition of control siRNA) were added to each of the Petri dishes containing the PANC-1, MIA PaCa-2, or A549 cells. For a control used, control siRNA was added at a final concentration of 100 nM. After culture for 1 day without the replacement of the medium, the GST-π mRNA level and the P21 mRNA level were quantified by quantitative PCR using 7300 Real Time PCR System (Applied Biosystems, Inc.). The results are shown in FIG. 1. As shown in FIG. 1, it was revealed that the amount of P21 mRNA is increased by knocking down GST-π by the siRNA.

[0201] Moreover, as for the case where GST-π siRNA or control siRNA at a final concentration of 50 nM was added to each of the Petri dishes containing the A549 cells or the MIA PaCa-2 cells, the P21 mRNA level was similarly quantified every day from the day of addition of GST-π siRNA or control siRNA to the 4th day. The results are shown in FIG. 2. As shown in FIG. 2, it was revealed that the expression level of P21 mRNA is increased over time by knocking down GST-π by the siRNA.

[0202] Meanwhile, the influence of GST-π siRNA and/or P21 siRNA on the number of cells was tested. First, GST-π siRNA and P21 siRNA each at a final concentration of 50 nM, or GST-π siRNA or P21 siRNA at a final concentration of 50 nM (both added with control siRNA at a final concentration of 50 nM) were added to each of the Petri dishes containing the PANC-1, MIA PaCa-2, or A549 cells. For a control used, control siRNA was added at a final concentration of 100 nM. After culture for 5 days without the replacement of the medium, the cells were dissociated and collected from the Petri dish by trypsin treatment, and the number of cells was counted. The results are shown in FIG. 3. As shown in FIG. 3, it is evident that when GST-π and P21 are knocked down each alone using GST-π siRNA or P21 siRNA, the number of cells cannot be decreased with respect to the number of inoculated cells, though cell growth is inhibited. However, it is evident that when GST-π and P21 are both knocked down using GST-π siRNA and P21 siRNA, not only is growth inhibited but cell death can be induced in the PANC-1 cells and the MIA PaCa-2 cells expressing mutated KRAS.

[0203] From FIG. 3, it was considered, as to the A549 cells expressing mutated KRAS, that cell death was not induced by the treatment mentioned above. Accordingly, the number of transfections with GST-π siRNA and P21 siRNA was increased, and the influence of GST-π siRNA and/or P21 siRNA on the number of cells was tested as to the A549 cells and the HCT116 cells expressing mutated KRAS.

[0204] First, for the PANC-1 cells, the MIA PaCa-2 cells, or the HCT116 cells, GST-π siRNA and P21 siRNA each at a final concentration of 25 nM, or GST-π siRNA or P21 siRNA at a final concentration of 25 nM (all added with control siRNA at a final concentration of 25 nM) were added to each of the Petri dishes, while for the A549 cells, GST-π siRNA and P21 siRNA each at a final concentration of 50 nM, or GST-π siRNA or P21 siRNA at a final concentration of 50 nM (added with control siRNA at a final concentration of 50 nM) were added to each of the Petri dishes. For a control, control siRNA was added at a final concentration of 50 nM for the PANC-1 cells, the MIA PaCa-2 cells, or the HCT116 cells and at a final concentration of 100 nM for the A549 cells. After 2 days and after 4 days, the medium was replaced (RPMI 1640 supplemented with 10% FBS for the PANC-1 cells, DMEM supplemented with 10% FBS for the A549 cells and the MIA PaCa-2 cells, and McCoy supplemented with 10% FBS for the HCT116 cells). Again, GST-π siRNA or P21 siRNA was added at a final concentration of 25 nM (all added with control siRNA at a final concentration of 25 nM) for the PANC-1 cells, the MIA PaCa-2 cells, or the HCT116 cells, and at a final concentration of 50 nM (added with control siRNA at a final concentration of 50 nM) for the A549 cell to each of the Petri dishes. In this case as well, for a control, control siRNA was added at a final concentration of 50 nM for the PANC-1 cells or the MIA PaCa-2 cells and at a final concentration of 100 nM for the A549 cells. Then, the cells were cultured without the replacement of the medium. Seven days after the cell inoculation, the cells were dissociated and collected from the Petri dish by trypsin treatment, and the number of cells was counted. In this case, the phase difference images of the cells were also taken.

[0205] The results of measuring the number of cells for the A549 cells, the PANC-1 cells, and the MIA PaCa-2 cells are shown in FIG. 4. The results of measuring the number of cells for the HCT116 cells are shown in FIG. 5. Also, the phase difference image taken for the A549 cells is shown in FIG. 6. The phase difference image taken for the MIA PaCa-2 cells is shown in FIG. 7. The phase difference image taken for the PANC-1 cells is shown in FIG. 8. The phase difference image taken for the HCT116 cells is shown in FIG. 9.

[0206] As shown in FIGS. 4 and 5, when GST-π and P21 were both knocked down three times using GST-π siRNA and P21 siRNA, the number of the cancer cells (A549 cells, MIA PaCa-2 cells, PANC-1 cells, and HCT116 cells) expressing mutated KRAS is decreased 7 days after the cell inoculation with respect to the number of initially inoculated cells; thus it was revealed that cell death can be induced.

[0207] Moreover, as shown in FIGS. 6 to 9, the cells of each cell line (A549 cells, MIA PaCa-2 cells, PANC-1 cells, and HCT116 cells) expressing mutated KRAS in which GST-π was knocked down by GST-π siRNA became flat and large cells; thus it was able to be presumed that cell senescence was evoked. It was further revealed that when GST-π and P21 were both knocked down using GST-π siRNA and P21 siRNA, the cell senescence-like phenotype observed in the GST-π knockdown disappeared. From this result, it was considered that when GST-π and P21 were both knocked down using GST-π siRNA and P21 siRNA, the cell senescence evoked by the GST-π knockdown was inhibited by the P21 knockdown.

[0208] Whether the cell senescence as shown in FIGS. 6 to 9 was could be induced by knocking down GST-π was tested using the M7609 cells. First, GST-π siRNA was added at a final concentration of 30 nM to the Petri dish containing the M7609 cells. After 1 day and after 2 days, the medium was replaced (RPMI 1640 supplemented with 10% FBS). Again, GST-π siRNA was added at a final concentration of 30 nM to the Petri dish containing the M7609 cells. Then, the cells were cultured with the medium replaced every other day. Thirteen days after the cell inoculation, the cells were stained using Senescence β-Galactosidase Staining Kit (Cell Signaling Technology, Inc.) according to the recommended protocol. A phase difference image was taken. The results are shown in FIG. 10. As shown in FIG. 10, the M7609 cells in which GST-π was knocked down became flat and large cells, and blue color development by β-galactosidase was observed in the cells having such a phenotype; thus it is evident that cell senescence was evoked.

[0209] In addition, whether the cell death induced by knocking down both GST-π and P21 in the cancer cells expressing mutated KRAS was apoptosis was tested by measuring the expression level of an apoptosis-inducing factor PUMA gene.

[0210] First, GST-π siRNA and P21 siRNA each at a final concentration of 50 nM, or GST-π siRNA or P21 siRNA at a final concentration of 50 nM (both added with control siRNA at a final concentration of 50 nM) were added to each of the Petri dishes containing the A549 cells or the MIA PaCa-2 cells. For a control, control siRNA was added at a final concentration of 100 nM. After culture for 1 day without the replacement of the medium, the PUMA mRNA level was quantified by quantitative PCR using 7300 Real Time PCR System (Applied Biosystems, Inc.).

[0211] The results are shown in FIG. 11. As shown in FIG. 11, it was revealed that the mRNA level of the apoptosis-promoting factor PUMA is drastically increased by knocking down both GST-π and p21 using GST-π siRNA and P21 siRNA. From this result, it was revealed that the cell death induced by knocking down both GST-π and P21 is apoptosis.

[0212] Apoptosis-related protein groups are present in cells. The apoptosis-related proteins are broadly classified into two groups: an apoptosis-inhibiting protein group and an apoptosis-inducing protein group. The apoptosis-inhibiting protein group includes Bcl-2, Bcl-XL, Bcl-W, MCL-1, and Bcl-B. Also, the apoptosis-inducing protein group includes Bax, Bak, BOK, BIM, BID, BAD, NOXA, and PUMA. In general, the apoptosis-inhibiting proteins such as Bcl-2, Bcl-XL, and MCL-1 reside on mitochondrial outer membranes and inhibit the release of cytochrome C to inhibit apoptosis. On the other hand, the apoptosis-inducing protein groups such as Bax, BIM, BID, and BAD reside in cytoplasms, but translocate to mitochondrial outer membranes in response to death signals and promote the release of cytochrome C to induce apoptosis.

[0213] Also, upon activation due to DNA damage or the like, p53 promotes the transcription of Bax, NOXA, and PUMA to induce apoptosis. Particularly, PUMA is a protein that has been isolated as an apoptosis-inducing protein to be activated by p53. PUMA binds directly to Bcl-2, thereby inhibiting the apoptosis-inhibiting effect of Bcl-2 and inducing the apoptosis of the cell.

[0214] From these results of Experiment 1, it was shown that when a drug inhibiting GST-π and a drug inhibiting P21 are allowed to act on a cancer cell, cell growth can be drastically inhibited and further cell death can be strongly induced. Even if the drug inhibiting GST-π is allowed to act alone on a cancer cell, cell death cannot be induced, though cell growth can be inhibited. Even if the drug inhibiting P21 is allowed to act alone on the cell, cell growth can be inhibited merely slightly. Accordingly, it is a surprising effect that the cell death can be induced for a cancer cell by allowing both of these drugs to act thereon.

### Experiment 2

[0215] In Experiment 1, the synthetic lethality for cancer cells was demonstrated using GST-π siRNA and P21 siRNA. In this Experiment 2, a cell cycle-regulating protein that exhibited synthetic lethality by inhibition together with GST-π was screened for.

[0216] First, a MIA PaCa-2 cell suspension having a concentration of 1×10⁴ cells/mL was prepared with DMEM supplemented with 10% FBS and 1% L-glutamine, and this was inoculated at 100 μL/well to a 96-well plate and then cultured for 18 hours in DMEM supplemented with 10% FBS and 1% L-glutamine. The MIA PaCa-2 cells that became 20 to 30% confluent were transfected with GST-π siRNA-2 and/or siRNA against a target gene using Lipofectamine RNAi MAX as follows.

[0217] The Lipofectamine/siRNA mixed solution for transfection was prepared as follows: first, 51 μL of DNase free water (Ambion, Life Technologies Corp.) was added to 0.1 nmol of each siRNA contained in Human siGENOME siRNA Library—Cell Cycle Regulation—SMART pool (GE Healthcare Dharmacon Inc.) and left standing at room temperature for 90 minutes. An siRNA solution in which this aqueous siRNA solution was supplemented with 19.9 μL of OPTI-MEM was prepared (solution A). Next, a 50 μM aqueous GST-π siRNA-2 solution and a 50 μM aqueous control siRNA solution were each diluted with OPTI-MEM in ten times to prepare diluted solutions of 5 μM GST-π siRNA-2 and 5 μM control siRNA (solution B). 31.2 μL of the solution A and 8.8 μL of the solution B were mixed (solution C). Next, a Lipofectamine solution in which 150 μL of Lipofectamine RNAi MAX and 2.35 mL of OPTI-MEM were mixed was prepared (solution D). Next, 37.5 μL of the solution C and 37.5 μL of the solution D were mixed and left standing at room temperature for 15 minutes (solution E).

[0218] The solution E was added to each well culturing MIA-PaCa-2 cell of the 96-well plate at 10 μL/well. Separately, a 50 μM aqueous control siRNA solution (5.5 μL) and OPTI-MEM (189.5 μL) were mixed to prepare a solution (solution F). Next, a 50 μM aqueous control siRNA solution was diluted with OPTI-MEM in ten times to prepare 5 μM control siRNA (solution G). 31.2 μL of the solution F and 8.8 μL of the solution G were mixed (solution H). Next, a Lipofectamine solution in which 150 μL of Lipofectamine RNAi MAX and 2.35 mL of OPTI-MEM were mixed was prepared (solution I). Next, 37.5 μL of the solution H and 37.5 μL of the solution I were mixed and left standing at room temperature for 15 minutes (solution J). The solution J was added to each well culturing MIA-PaCa-2 cell of the 96-well plate at 10 μL/well. Then, the cells were cultured in DMEM supplemented with 10% FBS and 10% L-glutamine. After 5 days, a growth evaluation test was conducted using CyQUANT NF Cell Proliferation Assay Kit (Invitrogen Corp.).

[0219] First, 1×HBSS buffer was added to 22 μL of CyQUANT NF dye reagent to prepare a staining reaction solution for CyQUANT NF Cell proliferation Assay. The medium of the transfected cells mentioned above was aspirated, and 50 μL of the staining reaction solution was added thereto. The cells were left standing at 37° C. for 30 minutes. Then, a fluorescence wavelength of 520 nm was observed in excitation with an excitation wavelength of 480 nm.

[0220] The results are shown in FIG. 12. As a result of screening 170 types of genes encoding cell cycle-regulating proteins in terms of synthetic lethality with GST-π, ATM, as shown in FIG. 12, CDC25A, PRKDC, RBBP8, SKP2, MCM10, RNPC1, CCNL1, CENPH, BRSK1, MCM8, CCNB3, and MCMDC1 in addition to P21 demonstrated in Experiment 1 were able to be screened for as cell cycle-regulating proteins that exhibited synthetic lethality by inhibition together with GST-π. Among them, P21, RNPC1, CCNL1, MCM8, CCNB3, and MCMDC1 were able to be screened for as cell cycle-regulating proteins that inhibited cell growth merely slightly (rate of growth inhibition: less than 20%) when inhibited alone, but exhibited synthetic lethality only when inhibited together with GST-π. Accordingly, it can be concluded that a drug inhibiting a cell cycle-regulating protein selected from P21, RNPC1, CCNL1, MCM8, CCNB3, and MCMDC1 is very low toxic in itself and is excellent in safety.

### Experiment 3

[0221] In Experiment 2, a cell cycle-regulating protein that exhibited synthetic lethality by inhibition together with GST-π was screened for. In this Experiment 3, a protein having an anti-apoptotic function that exhibited synthetic lethality by inhibition together with GST-π was screened for.

[0222] First, a MIA PaCa-2 cell suspension having a concentration of 1×10⁴ cells/mL was prepared with DMEM supplemented with 10% FBS and 1% L-glutamine, and this was inoculated at 100 μL/well to a 96-well plate and then cultured for 18 hours in DMEM supplemented with 10% FBS and 1% L-glutamine. The MIA PaCa-2 cells that became 20 to 30% confluent were transfected with GST-π siRNA-2 and/or siRNA against a target gene using Lipofectamine RNAi MAX as follows.

[0223] The Lipofectamine/siRNA mixed solution for transfection was prepared as follows: first, 51 μL of DNase free water (Ambion, Life Technologies Corp.) was added to 0.1 nmol of each siRNA contained in a custom-siRNA Library, which contains uniquely-selected 140 types of genes considered to have an anti-apoptosis function (siGENOME SMART pool Cherry-pick Library, GE Healthcare Dharmacon Inc.) and left standing at room temperature for 90 minutes. An siRNA solution in which this aqueous siRNA solution was supplemented with 19.9 μL of OPTI-MEM was prepared (solution A). Next, a 50 μM aqueous GST-π siRNA-2 solution and a 50 μM aqueous control siRNA solution were each diluted with OPTI-MEM to prepare solutions of 5 μM GST-π siRNA-2 and 5 μM control siRNA (solution B). 31.2 μL of the solution A and 8.8 μL of the solution B were mixed (solution C). Next, a Lipofectamine solution in which 150 μL of Lipofectamine RNAi MAX and 2.35 mL of OPTI-MEM were mixed was prepared (solution D). Next, 37.5 μL of the solution C and 37.5 μL of the solution D were mixed and left standing at room temperature for 15 minutes (solution E). The solution E was added to each well culturing MIA-PaCa-2 cell of the 96-well plate at 10 μL/well.

[0224] Separately, a 50 μM aqueous control siRNA solution (5.5 μL) and OPTI-MEM (189.5 μL) were mixed to prepare a solution (solution F). Next, a 50 μM aqueous control siRNA solution was diluted with OPTI-MEM in ten times to prepare 5 μM control siRNA (solution G). 31.2 μL of the solution F and 8.8 μL of the solution G were mixed (solution H). Next, a Lipofectamine solution in which 150 μL of Lipofectamine RNAi MAX and 2.35 mL of OPTI-MEM were mixed was prepared (solution I). Next, 37.5 μL of the solution H and 37.5 μL of the solution I were mixed and left standing at room temperature for 15 minutes (solution J). The solution J was added to each well culturing MIA-PaCa-2 cell of the 96-well plate at 10 μL/well. Then, the cells were cultured in DMEM supplemented with 10% FBS and 1% L-glutamine. After 5 days, a growth evaluation test was conducted using CyQUANT NF Cell Proliferation Assay Kit (Invitrogen Corp.).

[0225] First, 11 mL of 1×HBSS buffer was added to 22 μL of CyQUANT NF dye reagent to prepare a staining reaction solution for CyQUANT NF Cell proliferation Assay. The medium of the transfected cells mentioned above was aspirated, and 50 μL of the staining reaction solution was added thereto. The cells were left standing at 37° C. for 30 minutes. Then, a fluorescence wavelength of 520 nm was observed in excitation with an excitation wavelength of 480 nm.

[0226] The results are shown in FIG. 13. As a result of screening 140 types of genes encoding anti-apoptosis-related proteins in terms of synthetic lethality with GST-π, as shown in FIG. 13, AATF, AKT1, ALOX12, ANXA1, ANXA4, API5, ATF5, AVEN, AZU1, BAG1, BCL2L1, BFAR, CFLAR, IL2, MALT1, MCL1, MKL1, MPO, MTL5, MYBL2, and MYO18A were able to be screened for as anti-apoptosis-related proteins that exhibited synthetic lethality by inhibition together with GST-π.

The application's sequence listing, which the Patent Office published only in electronic form, follows.

SEQUENCE LISTING (80 sequences)

SEQ ID NO: 1 - DNA, 986 bp, Homo sapiens
  CDS (250)..(882)
tgggaaagagggaaaggcttccccggccagctgcgcggcgactccggggactccagggcgcccctctgcggccgacgcccggggtgcagcggccgccggggctggggccggcgggagtccgcgggaccctccagaagagcggccggcgccgtgactcagcactggggcggagcggggcgggaccacccttataaggctcggaggccgcgaggccttcgctggagtttcgccgccgcagtcttcgccaccatgccgccctacaccgtggtctatttcccagttcgaggccgctgcgcggccctgcgcatgctgctggcagatcagggccagagctggaaggaggaggtggtgaccgtggagacgtggcaggagggctcactcaaagcctcctgcctatacgggcagctccccaagttccaggacggagacctcaccctgtaccagtccaataccatcctgcgtcacctgggccgcacccttgggctctatgggaaggaccagcaggaggcagccctggtggacatggtgaatgacggcgtggaggacctccgctgcaaatacatctccctcatctacaccaactatgaggcgggcaaggatgactatgtgaaggcactgcccgggcaactgaagccttttgagaccctgctgtcccagaaccagggaggcaagaccttcattgtgggagaccagatctccttcgctgactacaacctgctggacttgctgctgatccatgaggtcctagcccctggctgcctggatgcgttccccctgctctcagcatatgtggggcgcctcagtgcccggcccaagctcaaggccttcctggcctcccctgagtacgtgaacctccccatcaatggcaacgggaaacagtgagggttggggggactctgagcgggaggcagagtttgccttcctttctccaggaccaataaaatttctaagagagctaaaaaaaaaaaaaaaaaaaaaaaaaaaaa

SEQ ID NO: 2 - protein, 210 aa, Homo sapiens
MPPYTVVYFPVRGRCAALRMLLADQGQSWKEEVVTVETWQEGSLKASCLYGQLPKFQDGDLTLYQSNTILRHLGRTLGLYGKDQQEAALVDMVNDGVEDLRCKYISLIYTNYEAGKDDYVKALPGQLKPFETLLSQNQGGKTFIVGDQISFADYNLLDLLLIHEVLAPGCLDAFPLLSAYVGRLSARPKLKAFLASPEYVNLPINGNGKQ

SEQ ID NO: 3 - DNA, 2175 bp, Homo sapiens
  CDS (126)..(620)
gttgtatatcagggccgcgctgagctgcgccagctgaggtgtgagcagctgccgaagtcagttccttgtggagccggagctgggcgcggattcgccgaggcaccgaggcactcagaggaggcgccatgtcagaaccggctggggatgtccgtcagaacccatgcggcagcaaggcctgccgccgcctcttcggcccagtggacagcgagcagctgagccgcgactgtgatgcgctaatggcgggctgcatccaggaggcccgtgagcgatggaacttcgactttgtcaccgagacaccactggagggtgacttcgcctgggagcgtgtgcggggccttggcctgcccaagctctaccttcccacggggccccggcgaggccgggatgagttgggaggaggcaggcggcctggcacctcacctgctctgctgcaggggacagcagaggaagaccatgtggacctgtcactgtcttgtacccttgtgcctcgctcaggggagcaggctgaagggtccccaggtggacctggagactctcagggtcgaaaacggcggcagaccagcatgacagatttctaccactccaaacgccggctgatcttctccaagaggaagccctaatccgcccacaggaagcctgcagtcctggaagcgcgagggcctcaaaggcccgctctacatcttctgccttagtctcagtttgtgtgtcttaattattatttgtgttttaatttaaacacctcctcatgtacataccctggccgccccctgccccccagcctctggcattagaattatttaaacaaaaactaggcggttgaatgagaggttcctaagagtgctgggcatttttattttatgaaatactatttaaagcctcctcatcccgtgttctccttttcctctctcccggaggttgggtgggccggcttcatgccagctacttcctcctccccacttgtccgctgggtggtaccctctggaggggtgtggctccttcccatcgctgtcacaggcggttatgaaattcaccccctttcctggacactcagacctgaattctttttcatttgagaagtaaacagatggcactttgaaggggcctcaccgagtgggggcatcatcaaaaactttggagtcccctcacctcctctaaggttgggcagggtgaccctgaagtgagcacagcctagggctgagctggggacctggtaccctcctggctcttgatacccccctctgtcttgtgaaggcagggggaaggtggggtcctggagcagaccaccccgcctgccctcatggcccctctgacctgcactggggagcccgtctcagtgttgagccttttccctctttggctcccctgtaccttttgaggagccccagctacccttcttctccagctgggctctgcaattcccctctgctgctgtccctcccccttgtcctttcccttcagtaccctctcagctccaggtggctctgaggtgcctgtcccacccccacccccagctcaatggactggaaggggaagggacacacaagaagaagggcaccctagttctacctcaggcagctcaagcagcgaccgccccctcctctagctgtgggggtgagggtcccatgtggtggcacaggcccccttgagtggggttatctctgtgttaggggtatatgatgggggagtagatctttctaggagggagacactggcccctcaaatcgtccagcgaccttcctcatccaccccatccctccccagttcattgcactttgattagcagcggaacaaggagtcagacattttaagatggtggcagtagaggctatggacagggcatgccacgtgggctcatatggggctgggagtagttgtctttcctggcactaacgttgagcccctggaggcactgaagtgcttagtgtacttggagtattggggtctgaccccaaacaccttccagctcctgtaacatactggcctggactgttttctctcggctccccatgtgtcctggttcccgtttctccacctagactgtaaacctctcgagggcagggaccacaccctgtactgttctgtgtctttcacagctcctcccacaatgctgaatatacagcaggtgctcaataaatgattcttagtgactttacttgtaaaaaaaaaaaaaaaaaa

SEQ ID NO: 4 - protein, 164 aa, Homo sapiens
MSEPAGDVRQNPCGSKACRRLFGPVDSEQLSRDCDALMAGCIQEARERWNFDFVTETPLEGDFAWERVRGLGLPKLYLPTGPRRGRDELGGGRRPGTSPALLQGTAEEDHVDLSLSCTLVPRSGEQAEGSPGGPGDSQGRKRRQTSMTDFYHSKRRLIFSKRKP

SEQ ID NO: 5 - DNA, 2410 bp, Homo sapiens
  CDS (185)..(904)
agagtccccgcagcgccggtcgggagcgcagcgcggcgcagctcggcgcgcacggcgggagcggcgcgcgagtggtcgggcctggcggctggacgggcgcccctcgctgccccgcgcgctccccgccgccccccatgagcgcagccccgcgcggcccgggtccgtaggcggcggggcgccccccatgctgctgcagcccgcgccgtgcgccccgagcgcgggcttcccgcggcccctggccgcccccggcgccatgcacggctcgcagaaggacaccacgttcaccaagatcttcgtgggcggcctgccgtaccacactaccgacgcctcgctcaggaagtacttcgagggcttcggcgacatcgaggaggccgtggtcatcaccgaccgccagacgggcaagtcccgcggctacggcttcgtgaccatggccgaccgggcggcagctgagagggcttgcaaagacccgaaccccatcatcgacggccgcaaggccaacgtgaacctggcatatctgggcgccaagccgcggagcctccagacgggctttgccattggggtgcagcagctgcaccccaccttgatccagcggacttacgggctgaccccgcactacatctacccaccagccatcgtgcagcccagcgtggtgatcccagccgcccctgtcccgtcgctgtcctcgccctacattgagtacacgccggccagcccggcctacgcccagtacccaccggccacctatgaccagtacccatacgccgcctcgcctgccacggctgccagcttcgtgggctacagctaccctgccgccgtgccccaggccctctcagccgcagcacccgcgggcaccactttcgtgcagtaccaggcgccgcagctgcagcctgacaggatgcagtgaggggcgttcctgccccgaggactgtggcattgtcaccttcacagcagacagagctgccaggccatgatgggctggcgacagcccggctgagcttcagtgaggtgccaccagcacccgtgcctccgaagaccgctcgggcattccgcctgcgccctgggacagcggagagacggcttctctttaatctaggtcccattgtgtcttgagggaggactttaagaatgactgagaactatttaaagacgcaatcccaggttccttgcacaccatggcagcctctccttgcaccttctcctgcctctccacactccaggttccctcaggcttgtgtccccactgctgcatcgtggcggggtgtcacagaccctctgcagcccctggctgccctggactgtgcagagatgcctgactccagggaaacctgaaagcaagaagttaatggactgtttattgtaacttgatcctcccgagctgtgagcgcagtctgaggtgtgaggacacggcctcctgttggagtcccattttctccatcagggcacgtgggcggcttcctcaagcccggaggagctcccaggcgcacaggggccgccggtaacaggggccgccggccaaaggcccctttccagtcatagcactgaagttgcaacttttttcttgtaattgttttgctactaagataatttcagaagttcagtctattttttcagcggatactgccgccaccaagaatccaaaacctatttttgacttggagagacttgcttttgttggttccgcccgtggagacgacgatagtgtttctgtataataaagtgtctgccggctcgcgggccaggatcctctcggtgggatgggcaccacagacaggaggcccctcaggcccgtgcgggccactgtctgctgccgcctgccggggtggcagagtgagttgtctcaggaccccgtcactgcgacgttgacactcctctcccttcccttcctccccaactccccaaacactgtggaaggggagaaggaagtgatccacagcattcaggccacttggggtctagaccatggtggtgccagcctggggggggcagtggccctcagctctgcccgctggagcggttgagtgcagaagggtgcgcctcttccctctacccccgcaccacctgctgtgtgccagcctgagacggttcctgcctgtcttgggggttggtggagggtggaggcagttctgccagccgtggcagggctgctatggggcatccagggctgtgggggtctggaggaggggacatgaggtgagaggtatcctggccgagggcggggggcagcggggggtctccctccggacctacctcagggagctgagcgtgcaggcgctccagggcaggcctgggacagagtcaaggctcagagaataaaggtagctaatctcatcataatatttttattagaatgttctgatgataaaaataaaacttgttttctttaaagaaaaaaaaaaaaaaaaaaaaaaaa

SEQ ID NO: 6 - protein, 239 aa, Homo sapiens
MLLQPAPCAPSAGFPRPLAAPGAMHGSQKDTTFTKIFVGGLPYHTTDASLRKYFEGFGDIEEAVVITDRQTGKSRGYGFVTMADRAAAERACKDPNPIIDGRKANVNLAYLGAKPRSLQTGFAIGVQQLHPTLIQRTYGLTPHYIYPPAIVQPSVVIPAAPVPSLSSPYIEYTPASPAYAQYPPATYDQYPYAASPATAASFVGYSYPAAVPQALSAAAPAGTTFVQYQAPQLQPDRMQ

SEQ ID NO: 7 - DNA, 2625 bp, Homo sapiens
  CDS (600)..(2180)
atagggtccacagccttgtgttcttcaaatactgtaaagcagccctctccagattccttgagggtcactttatattacacattcgtccacacaggacaacaaagtcaccacttccacccgccaaagcgcgctcaggtcggccgccacttcccttggtacacgcggaacgcaagccgcgccgaggctaaaggaagaggccggaatgcagggcgaaggggcgcagagatgctagccaatgctgccacctctattttggatataagggatcttgtaaagctccgttattcgtgtggctatcacaaacaaggtggtttcgaccggccttggctagagaaggcctcctcagcctctgaggatcccaaggtctgtcgcagcacccaacactcccctcgcaggcccagatgccgagggcggaggcgcggcctggagggactagttggcgcgcggctgcccggcgtggtgacgtcagggcggaagcgcacgcggcgtgaagcggcccagaacccggcggtcacgggaatatccgtcgcgccgagaacgctggttagtcttgtttcgggttccggctgcgttgggcttgcgtgcggctcgctaagactatggcgtccgggcctcattcgacagctactgctgccgcagccgcctcatcggccgccccaagcgcgggcggctccagctccgggacgacgaccacgacgacgaccacgacgggagggatcctgatcggcgatcgcctgtactcggaagtttcacttaccatcgaccactctctgattccggaggagaggctctcgcccaccccatccatgcaggatgggctcgacctgcccagtgagacggacttacgcatcctgggctgcgagctcatccaggccgccggcattctcctccggctgccgcaggtggcgatggcaacggggcaggtgttgtttcatcgttttttctactccaaatctttcgtcaaacacagtttcgagattgttgctatggcttgtattaatcttgcatcaaaaatcgaagaagcacctagaagaataagagatgtgattaatgtattccaccacctccgccagttaagaggaaaaaggactccaagccccctgatccttgatcagaactacattaacaccaaaaatcaagttatcaaagcagagaggagggtgctaaaggagttgggattttgtgttcatgtcaagcatcctcataagatcattgttatgtatttacaagtcttagaatgtgaacgtaatcaaaccctggttcaaactgcctggaattacatgaatgacagtcttcgaaccaatgtgtttgttcgatttcaaccagagactatagcatgtgcttgcatctaccttgcagctagagcacttcagattccgttgccaactcgtccccattggtttcttctttttggtactacagaagaggaaatccaggaaatctgcatagaaacacttaggctttataccagaaaaaagccaaactatgaattactggaaaaagaagtagaaaaaagaaaagtagccttacaagaagccaaattaaaagcaaagggattgaatccggatggaactccagccctttcaaccctgggtggattttctccagcctccaagccatcatcaccaagagaagtaaaagctgaagagaaatcaccaatctccattaatgtgaagacagtcaaaaaagaacctgaggatagacaacaggcttccaaaagcccttacaatggtgtaagaaaagacagcaagagaagtagaaatagcagaagtgcaagtcgatcgaggtcaagaacacgatcacgttctagatcacatactccaagaagacactataataataggcggagtcgatctggaacatacagctcgagatcaagaagcaggtcccgcagtcacagtgaaagccctcgaagacatcataatcatggttctcctcaccttaaggccaagcataccagagatgatttaaaaagttcaaacagacatggtcataaaaggaaaaaatctcgttctcgatctcagagcaagtctcgggatcactcagatgcagccaagaaacacaggcatgaaaggggacatcatagggacaggcgtgaacgatctcgctcctttgagaggtcccataaaagcaagcaccatggtggcagtcgctcaggacatggcaggcacaggcgctgactttctcttcctttgagcctgcatcagttcttggttttgcctatctacagtgtgatgtatggactcaatcaaaaacattaaacgcaaactgattaggatttgatttcttgaaaccctctaggtctctagaacactgaggacagtttcttttgaaaagaactatgttaatttttttgcacattaaaatgccctagcagtatctaattaaaaaccatggtcaggttcaattgtactttattatagttgtgtattgtttattgctataagaactggagcgtgaattctgtaaaaatgtatcttatttttatacagataaaattgcagacactgttctatttaagtggttatttgtttaaatgatggtgaatactttcttaacactggtttgtctgcatgtgtaaagatttttacaaggaaataaaatacaaatcttgttttttctaaa

SEQ ID NO: 8 - protein, 526 aa, Homo sapiens
MASGPHSTATAAAAASSAAPSAGGSSSGTTTTTTTTTGGILIGDRLYSEVSLTIDHSLIPEERLSPTPSMQDGLDLPSETDLRILGCELIQAAGILLRLPQVAMATGQVLFHRFFYSKSFVKHSFEIVAMACINLASKIEEAPRRIRDVINVFHHLRQLRGKRTPSPLILDQNYINTKNQVIKAERRVLKELGFCVHVKHPHKIIVMYLQVLECERNQTLVQTAWNYMNDSLRTNVFVRFQPETIACACIYLAARALQIPLPTRPHWFLLFGTTEEEIQEICIETLRLYTRKKPNYELLEKEVEKRKVALQEAKLKAKGLNPDGTPALSTLGGFSPASKPSSPREVKAEEKSPISINVKTVKKEPEDRQQASKSPYNGVRKDSKRSRNSRSASRSRSRTRSRSRSHTPRRHYNNRRSRSGTYSSRSRSRSRSHSESPRRHHNHGSPHLKAKHTRDDLKSSNRHGHKRKKSRSRSQSKSRDHSDAAKKHRHERGHHRDRRERSRSFERSHKSKHHGGSRSGHGRHRR

SEQ ID NO: 9 - DNA, 3715 bp, Homo sapiens
  CDS (378)..(2900)
ctttgagcggaagttggatcactgaagcgccaaaaaagaatttaggggaagacctgattttcgcttgaggcatttttgcggcgctgtgcgctacagacaccttctggaagctgcggtggggaaactgagtttcccgagccgttgagacagatggggttcagcaccgcgcggggacgacaggaaagctgcggctgaagagaactgcggacttggcaggagtcgcctgaggagctaagatcccggagactcttagccccgtggtgcttctctacgggagggagggagggagaatccggccggacagatctgcgcgtatcctggagccggcccagttgtgaactaggagagctttgggacctctgtcccaagcaagagagatgaatggagagtatagaggcagaggatttggacgaggaagatttcaaagctggaaaaggggaagaggtggtgggaacttctcaggaaaatggagagaaagagaacacagacctgatctgagtaaaaccacaggaaaacgtacttctgaacaaaccccacagtttttgctttcaacaaagaccccacagtcaatgcagtcaacattggatcgattcataccatataaaggctggaagctttatttctctgaagtttacagcgatagctctcctttgattgagaagattcaagcatttgaaaaatttttcacaaggcatattgatttgtatgacaaggatgaaatagaaagaaagggaagtattttggtagattttaaagaactgacagaaggtggtgaagtaactaacttgataccagatatagcaactgaactaagagatgcacctgagaaaaccttggcttgcatgggtttggcaatacatcaggtgttaactaaggaccttgaaaggcatgcagctgagttacaagcccaggaaggattgtctaatgatggagaaacaatggtaaatgtgccacatattcatgcaagggtgtacaactatgagcctttgacacagctcaagaatgtcagagcaaattactatggaaaatacattgctctaagagggacagtggttcgtgtcagtaatataaagcctctttgcaccaagatggcttttctttgtgctgcatgtggagaaattcagagctttcctcttccagatggaaaatacagtcttcccacaaagtgtcctgtgcctgtgtgtcgaggcaggtcatttactgctctccgcagctctcctctcacagttacgatggactggcagtcaatcaaaatccaggaattgatgtctgatgatcagagagaagcaggtcggattccacgaacaatagaatgtgagcttgttcatgatcttgtggatagctgtgtcccgggagacacagtgactattactggaattgtcaaagtctcaaatgcggaagaaggttctcgaaataagaatgacaagtgtatgttccttttgtatattgaagcaaattctattagtaatagcaaaggacagaaaacaaagagttctgaggatgggtgtaagcatggaatgttgatggagttctcacttaaagacctttatgccatccaagagattcaagctgaagaaaacctgtttaaactcattgtcaactcgctttgccctgtcatttttggtcatgaacttgttaaagcaggtttggcattagcactctttggaggaagccagaaatacgcagatgacaaaaacagaattccaattcggggagacccccacatccttgttgttggagatccaggcctaggaaaaagtcaaatgctacaggcagcgtgcaatgttgccccacgtggcgtgtatgtttgtggtaacaccacgaccacctctggtctgacggtaactctttcaaaagatagttcctctggagattttgctttggaagctggtgccctggtacttggtgatcaaggtatttgtggaatcgatgaatttgataagatggggaatcaacatcaagccttgttggaagccatggagcagcaaagtattagtcttgctaaggctggtgtggtttgtagccttcctgcaagaacttccattattgctgctgcaaatccagttggaggacattacaataaagccaaaacagtttctgagaatttaaaaatggggagtgcactactatccagatttgatttggtctttatcctgttagatactccaaatgagcatcatgatcacttactctctgaacatgtgattgcaataagagctggaaagcagagaaccattagcagtgccacagtagctcgtatgaatagtcaagattcaaatacttccgtacttgaagtagtttctgagaagccattatcagaaagactaaaggtggttcctggagaaacaatagatcccattccccaccagctattgagaaagtacattggctatgctcggcagtatgtgtacccaaggctatccacagaagctgctcgagttcttcaagatttttaccttgagctccggaaacagagccagaggttaaatagctcaccaatcactaccaggcagctggaatctttgattcgtctgacagaggcacgagcaaggttggaattgagagaggaagcaaccaaagaagacgctgaggatatagtggaaattatgaaatatagcatgctaggaacttactctgatgaatttgggaacctagattttgagcgatcccagcatggttctggaatgagcaacaggtcaacagcgaaaagatttatttctgctctcaacaacgttgctgaaagaacttataataatatatttcaatttcatcaacttcggcagattgccaaagaactaaacattcaggttgctgattttgaaaattttattggatcactaaatgaccagggttacctcttgaaaaaaggcccaaaagtttaccagcttcaaactatgtaaaaggacttcaccaagttagggcctcctgggtttattgcagattaaagccatctcagtgaagatatgcgtgcacgcacagacagacagacacacacacacacacacacacacacacacacacacacacacacagtcaaatactgttctctgaaaaatgatgtcccaaaagtattataataggaaaaaagcattaaatataataaactaatttaagaagtgataaagtctccagatgcagtagctcacactgtaatcacagtgactcaggaggctgaggtgagaggattccttgaggccagggttcgagaccaaccttgggcaacatagcaagaccccatttcttaaaaaaaaaaaaaaaaaatttaaacttagctgggtatggtggcacatgcctatagtctcagctacttgtgaggctgaggcaggaggattctttgagcccaggagtttgaggttacagtgagccacaatcacaccaatcactgcactccagcctgggcaataaagtaactcttgactcaaaaaaataaaaaaaattgtagtggtagccatgtgttaattgttaaataaattctccaaagggctaaaagtaaattacttataaattttttatagttgtatttttgacctgccttttatatgtatgaatatttcatagttttgcatatcagatgtaggcatacagacaaatacataaaccaatgaatatattacatattctgtgttccaataaaactttatttatggacactaaaatttgaatttcataaaattttcccatgtcaagaatacaaaatacttgagttttgttttta

SEQ ID NO: 10 - protein, 840 aa, Homo sapiens
MNGEYRGRGFGRGRFQSWKRGRGGGNFSGKWREREHRPDLSKTTGKRTSEQTPQFLLSTKTPQSMQSTLDRFIPYKGWKLYFSEVYSDSSPLIEKIQAFEKFFTRHIDLYDKDEIERKGSILVDFKELTEGGEVTNLIPDIATELRDAPEKTLACMGLAIHQVLTKDLERHAAELQAQEGLSNDGETMVNVPHIHARVYNYEPLTQLKNVRANYYGKYIALRGTVVRVSNIKPLCTKMAFLCAACGEIQSFPLPDGKYSLPTKCPVPVCRGRSFTALRSSPLTVTMDWQSIKIQELMSDDQREAGRIPRTIECELVHDLVDSCVPGDTVTITGIVKVSNAEEGSRNKNDKCMFLLYIEANSISNSKGQKTKSSEDGCKHGMLMEFSLKDLYAIQEIQAEENLFKLIVNSLCPVIFGHELVKAGLALALFGGSQKYADDKNRIPIRGDPHILVVGDPGLGKSQMLQAACNVAPRGVYVCGNTTTTSGLTVTLSKDSSSGDFALEAGALVLGDQGICGIDEFDKMGNQHQALLEAMEQQSISLAKAGVVCSLPARTSIIAAANPVGGHYNKAKTVSENLKMGSALLSRFDLVFILLDTPNEHHDHLLSEHVIAIRAGKQRTISSATVARMNSQDSNTSVLEVVSEKPLSERLKVVPGETIDPIPHQLLRKYIGYARQYVYPRLSTEAARVLQDFYLELRKQSQRLNSSPITTRQLESLIRLTEARARLELREEATKEDAEDIVEIMKYSMLGTYSDEFGNLDFERSQHGSGMSNRSTAKRFISALNNVAERTYNNIFQFHQLRQIAKELNIQVADFENFIGSLNDQGYLLKKGPKVYQLQTM

SEQ ID NO: 11 - DNA, 1212 bp, Homo sapiens
  CDS (115)..(990)
aggtgtctggaactggattacagtttcttctgattgaacgcagcctttgaatactgcctggcctatcgcgaatacatccctgccttggacaagacgcagctgaatctctaagtgatgctactgccactaccaccccagagctccaaacctgtgcctaagaaatctcagtccagcaaaattgtgcccagtcatcatgacccatctgaaaagacgggggagaattgccaaacgaagatatctccatcttcacttcaggagtctccatcttcacttcagggagcactcaaaaagagatcagcttttgaagatctcactaatgtgtcctttgagatgacccatgagaccctgtacttggcagtgaagctggtggatctctacctaatgaaggcagtatgcaagaaggataagttacaactccttggtgccactgcctttatgattgcagcaaaatttgaggagcacaactcacctcgtgtggatgactttgtgtacatctgtgatgataattatcagcgatctgaggtactcagcatggaaatcaacatcctgaacgtcctcaaatgtgacattaacattcccatcgcctaccattttctgcgcagatatgctaggtgtatccacaccaacatgaagacactgaccttgtcccgctacatctgcgagatgaccctgcaggaataccactatgtccaggagaaggcttccaagctagctgctgcctccttactcctggccctctacatgaagaagctcggatactgggttcccttcctggagcattacagtggctacagtatctctgagcttcaccccttggtcagacagctgaacaaactgctgactttcagttcttacgatagtctcaaggctgtgtattacaagtattctcacccggtcttctttgaagtcgccaaaatccctgccttggatatgttgaagctggaggagattttgaactgtgattgtgaggctcagggcctggtactctagcagcagccacagggctaagcatgcatgttaacagggtatatttattctatgttcgaatttgtcttttgatcgcttttattcatttttcctttctttgtcttttcccaaactgataatgttataaatatttatgttgcttgtttttatgaaagaaaaaatattgtcatatttgactacaaatttaataaaaaattaatggttattgttaaaaaaaaaaaaaaa

SEQ ID NO: 12 - protein, 291 aa, Homo sapiens
MLLPLPPQSSKPVPKKSQSSKIVPSHHDPSEKTGENCQTKISPSSLQESPSSLQGALKKRSAFEDLTNVSFEMTHETLYLAVKLVDLYLMKAVCKKDKLQLLGATAFMIAAKFEEHNSPRVDDFVYICDDNYQRSEVLSMEINILNVLKCDINIPIAYHFLRRYARCIHTNMKTLTLSRYICEMTLQEYHYVQEKASKLAAASLLLALYMKKLGYWVPFLEHYSGYSISELHPLVRQLNKLLTFSSYDSLKAVYYKYSHPVFFEVAKIPALDMLKLEEILNCDCEAQGLVL

SEQ ID NO: 13 - DNA, 4822 bp, Homo sapiens
  CDS (16)..(3447)
ttacctagattcaagatgaatagcgatcaagttacactggttggtcaagtgtttgagtcatatgtttcggaataccataagaatgatattcttctaatcttgaaggaaagggatgaagatgctcattacccagttgtggttaatgccatgactctgtttgagaccaacatggaaatcggggaatatttcaacatgttccccagtgaagtgcttacaatttttgatagtgcactgcgaaggtcagccttgacaattctccagtccctttctcagcctgaggctgtttccatgaaacagaatcttcatgccaggatatcaggtttgcctgtctgtcctgagctggtgagggaacacatacctaaaaccaaggatgtgggacactttttatctgtcactgggacagtgattcgaacaagtctggtgaaggttctggagtttgagcgggattacatgtgtaacaaatgcaagcatgtgtttgtgatcaaggctgactttgagcagtattacaccttttgccggccatcctcgtgtcccagcttggagagctgtgattcctctaaattcacttgcctctcaggcttgtcttcgtctccaaccaggtgtagagattaccaggaaatcaaaattcaggaacaggttcaaaggctatctgttggaagtattccacgatctatgaaggttattctggaagatgacttagtggatagttgcaaatctggtgatgacctcactatttacgggattgtaatgcaacggtggaagccctttcagcaagatgtgcgctgtgaagtggagatagtcctgaaagcaaattacatccaagtaaataatgagcagtcctcagggatcatcatggatgaggaggtccaaaaggaattcgaagatttttgggaatactataagagcgatccctttgcaggaaggaatgtaatattggctagcttgtgccctcaagtgtttggaatgtatctagtaaagcttgctgtggccatggtgctggctggtgggattcaaaggactgatgctacaggaacacgggtcagaggagaatctcatcttttattggttggggatcctggcacagggaaatctcagttcctcaaatatgcagcaaagattacaccaagatctgtgctgaccacaggaattggatctactagtgcaggtctgacggtaactgctgtaaaagactcaggagaatggaatttggaggctggggcattagttcttgcagatgcgggcctttgctgtattgatgagttcaatagcctcaaagagcatgataggaccagtatccatgaagcaatggagcaacaaaccataagtgttgctaaggctggcctcgtgtgcaagctgaacacaaggaccaccatcctggcagcaacgaaccccaaaggccagtacgacccccaggagtccgtgtctgtgaacattgccctcggcagcccactcttaagtcgatttgacctgatcctggttttgcttgataccaagaatgaagactgggatcgtatcatttcctcctttatcttagaaaataaaggttacccaagcaaatcagagaagctctggagcatggaaaagatgaaaacctatttctgcctcataaggaatctgcagcccacactgtctgatgtgggcaatcaggttcttctccggtactaccagatgcaaaggcagagtgattgccggaacgctgcccggaccaccattcggctgttggaaagcttgatacgattagcagaagctcatgctcgcctgatgtttcgtgatactgtaactctggaagacgctattacggtggtgtcagtcatggagtcctcaatgcagggaggtgcactgctaggaggtgtgaatgccctccacacttcctttcctgaaaaccctggagagcagtaccagagacagtgtgaacttattctggaaaagctagagctgcagagcctcttgagtgaagagcttagaagacttgaaaggttacagaatcagagtgtgcaccaatcccaaccacgggtattggaggtagagactactccaggatccttgagaaatggtccaggggaagaatcaaacttcagaacttcatcacagcaggaaatcaactatagcacacatatcttctctcctggaggcagccccgagggaagcccagttctagatcccccaccgcatctggagcctaatagatcaacaagtaggaaacattcagctcagcacaaaaataacagagatgacagtttagattggtttgatttcatggcaactcatcagagtgaacctaaaaacactgttgttgtgtctcctcatcccaaaacatctggagaaaatatggcttcgaagatctctaacagcacatctcagggtaaggagaagagtgagccaggccaaaggagcaaagtggacattgggttgcttccatcaccaggagagacaggtgttccatggagggcagacaatgtggaaagtaacaagaaaaaaaggctagcactagattctgaagcagcagtctctgctgataaaccagactcagtactgactcatcatgtccccaggaacctgcagaagctgtgcaaagagagggcccagaagttgtgcagaaatagcaccagggtgcctgcacagtgcacagtcccttcccatcctcagtccactcctgtacatagcccagacagaatgctggactcacccaaaagaaagagaccgaaatcccttgcgcaagtggaagagcctgcaattgaaaatgttaagcctccaggttcccctgtggccaaactggcaaaatttactttcaagcagaagtcaaaactgatccactcctttgaagatcacagccatgtgtcacctggtgcaactaaaatagcagttcatagtcctaaaatttcccagcgtagaacaagaagagacgcagccttgccggtgaagcgtccaggaaagttaacatctaccccaggaaaccagatctccagtcagccacagggtgagacaaaggaggtgtcgcagcagccaccagagaaacacggaccaagagagaaggtgatgtgtgcccctgagaagaggattattcagcctgaattagagcttgggaacgagactgggtgtgctcatcttacttgtgagggagacaaaaaggaagaggtttcaggcagtaataaaagcggcaaggttcatgcctgcacattagccagattggcaaacttctgctttactcccccatcggaatccaaatcaaaatcccctcctcctgaaaggaagaaccgaggtgagagaggcccaagctcccctcctacaaccacagctccaatgcgtgtcagtaaaaggaaatcttttcagctccgtgggtccaccgagaaactgattgtttccaaagaatccctcttcactttaccagaactaggtgatgaagcatttgattgtgactgggatgaagagatgagaaaaaagtcatagttgggaaaagctttctggtcaaatctcaccttcttcaactccacagaggaccttcaggatatcaatatggtatttataaatgtatagaacaattggccatattgaggatcactctgaatactggctcccccttaaggctttctaatttcaggttaatcttcatgacttaaaaagttgtataatcagttgaggtcagtgtgataccagcagctgagctgaattaattatgttgtgcttaattttacaaatggagtacttgtattcctgttcctgaagctgtttctgttttttgttttgttttgtttttaagggggagaggttcttccctagattaatttcttctttcattcactcaggaacaaatgtcaagaaggtagcactcataaatctaacaaggcagatgaactcttttctactttttttttttttttttgtattttcacctggaatgggctaagtacagtgaatataatcacttggatgatttgccaaaatcagactatttttctagtattatttttgtattgatttgtgtggatcaggttaaatgtgactaatgcttttctttctttgagaggtatccttacaattccatgatgttcttagagatctggccactggtcaaacagtacctttctgaagtactgaccttctgagttgtcctttctttcttgagccaacattttgtacttcagattcttttttctcttgggggcctaccttcaaccaagtaaaatactgtgattagaagaagagagagtatgagccaggcacagtgactcactcctgtagtcctagctactcggggaggctgaggcaggatgattgcttaagcccaggagttcggggttacagtgagctgtggtcacaccactgtattccagcctgggtgacagagtgagatcctgtctctaaaaataaaataaatgaagaagagagactatgtggtagtctcaatcaaacatcatgtctcatctacccagctggttaatatggaaatgtgattcctactaagttgtgattcacttgtctttaaaaccaaggaaattatatactgtttttggtcagaatagataacctcaagctttgtctttctatgtgcttttaaaatcacttattcctttggattctaataagggttattaggattcagtaattatggactttctcttctgaagtgtgaatttgtaaactgattgtttaattgtcagagggacttttggacatagaatactcaaaactatatgtattttgtttaattttcacttcattcaattcacgcattgaaaacaaatttagaaaatccaatttttcttaagcatttaaacgttctaaaattcactaataaaattttctgaaaaaatttaaactgtga

SEQ ID NO: 14 - protein, 1143 aa, Homo sapiens
MNSDQVTLVGQVFESYVSEYHKNDILLILKERDEDAHYPVVVNAMTLFETNMEIGEYFNMFPSEVLTIFDSALRRSALTILQSLSQPEAVSMKQNLHARISGLPVCPELVREHIPKTKDVGHFLSVTGTVIRTSLVKVLEFERDYMCNKCKHVFVIKADFEQYYTFCRPSSCPSLESCDSSKFTCLSGLSSSPTRCRDYQEIKIQEQVQRLSVGSIPRSMKVILEDDLVDSCKSGDDLTIYGIVMQRWKPFQQDVRCEVEIVLKANYIQVNNEQSSGIIMDEEVQKEFEDFWEYYKSDPFAGRNVILASLCPQVFGMYLVKLAVAMVLAGGIQRTDATGTRVRGESHLLLVGDPGTGKSQFLKYAAKITPRSVLTTGIGSTSAGLTVTAVKDSGEWNLEAGALVLADAGLCCIDEFNSLKEHDRTSIHEAMEQQTISVAKAGLVCKLNTRTTILAATNPKGQYDPQESVSVNIALGSPLLSRFDLILVLLDTKNEDWDRIISSFILENKGYPSKSEKLWSMEKMKTYFCLIRNLQPTLSDVGNQVLLRYYQMQRQSDCRNAARTTIRLLESLIRLAEAHARLMFRDTVTLEDAITVVSVMESSMQGGALLGGVNALHTSFPENPGEQYQRQCELILEKLELQSLLSEELRRLERLQNQSVHQSQPRVLEVETTPGSLRNGPGEESNFRTSSQQEINYSTHIFSPGGSPEGSPVLDPPPHLEPNRSTSRKHSAQHKNNRDDSLDWFDFMATHQSEPKNTVVVSPHPKTSGENMASKISNSTSQGKEKSEPGQRSKVDIGLLPSPGETGVPWRADNVESNKKKRLALDSEAAVSADKPDSVLTHHVPRNLQKLCKERAQKLCRNSTRVPAQCTVPSHPQSTPVHSPDRMLDSPKRKRPKSLAQVEEPAIENVKPPGSPVAKLAKFTFKQKSKLIHSFEDHSHVSPGATKIAVHSPKISQRRTRRDAALPVKRPGKLTSTPGNQISSQPQGETKEVSQQPPEKHGPREKVMCAPEKRIIQPELELGNETGCAHLTCEGDKKEEVSGSNKSGKVHACTLARLANFCFTPPSESKSKSPPPERKNRGERGPSSPPTTTAPMRVSKRKSFQLRGSTEKLIVSKESLFTLPELGDEAFDCDWDEEMRKKS

SEQ ID NO: 15 - DNA, 13147 bp, Homo sapiens
  CDS (386)..(9556)
ccggagcccgagccgaagggcgagccgcaaacgctaagtcgctggccattggtggacatggcgcaggcgcgtttgctccgacgggccgaatgttttggggcagtgttttgagcgcggagaccgcgtgatactggatgcgcatgggcataccgtgctctgcggctgcttggcgttgcttcttcctccagaagtgggcgctgggcagtcacgcagggtttgaaccggaagcgggagtaggtagctgcgtggctaacggagaaaagaagccgtggccgcgggaggaggcgagaggagtcgggatctgcgctgcagccaccgccgcggttgatactactttgaccttccgagtgcagtgacagtgatgtgtgttctgaaattgtgaaccatgagtctagtacttaatgatctgcttatctgctgccgtcaactagaacatgatagagctacagaacgaaagaaagaagttgagaaatttaagcgcctgattcgagatcctgaaacaattaaacatctagatcggcattcagattccaaacaaggaaaatatttgaattgggatgctgtttttagatttttacagaaatatattcagaaagaaacagaatgtctgagaatagcaaaaccaaatgtatcagcctcaacacaagcctccaggcagaaaaagatgcaggaaatcagtagtttggtcaaatacttcatcaaatgtgcaaacagaagagcacctaggctaaaatgtcaagaactcttaaattatatcatggatacagtgaaagattcatctaatggtgctatttacggagctgattgtagcaacatactactcaaagacattctttctgtgagaaaatactggtgtgaaatatctcagcaacagtggttagaattgttctctgtgtacttcaggctctatctgaaaccttcacaagatgttcatagagttttagtggctagaataattcatgctgttaccaaaggatgctgttctcagactgacggattaaattccaaatttttggactttttttccaaggctattcagtgtgcgagacaagaaaagagctcttcaggtctaaatcatatcttagcagctcttactatcttcctcaagactttggctgtcaactttcgaattcgagtgtgtgaattaggagatgaaattcttcccactttgctttatatttggactcaacataggcttaatgattctttaaaagaagtcattattgaattatttcaactgcaaatttatatccatcatccgaaaggagccaaaacccaagaaaaaggtgcttatgaatcaacaaaatggagaagtattttatacaacttatatgatctgctagtgaatgagataagtcatataggaagtagaggaaagtattcttcaggatttcgtaatattgccgtcaaagaaaatttgattgaattgatggcagatatctgtcaccaggtttttaatgaagataccagatccttggagatttctcaatcttacactactacacaaagagaatctagtgattacagtgtcccttgcaaaaggaagaaaatagaactaggctgggaagtaataaaagatcaccttcagaagtcacagaatgattttgatcttgtgccttggctacagattgcaacccaattaatatcaaagtatcctgcaagtttacctaactgtgagctgtctccattactgatgatactatctcagcttctaccccaacagcgacatggggaacgtacaccatatgtgttacgatgccttacggaagttgcattgtgtcaagacaagaggtcaaacctagaaagctcacaaaagtcagatttattaaaactctggaataaaatttggtgtattacctttcgtggtataagttctgagcaaatacaagctgaaaactttggcttacttggagccataattcagggtagtttagttgaggttgacagagaattctggaagttatttactgggtcagcctgcagaccttcatgtcctgcagtatgctgtttgactttggcactgaccaccagtatagttccaggaacggtaaaaatgggaatagagcaaaatatgtgtgaagtaaatagaagcttttctttaaaggaatcaataatgaaatggctcttattctatcagttagagggtgacttagaaaatagcacagaagtgcctccaattcttcacagtaattttcctcatcttgtactggagaaaattcttgtgagtctcactatgaaaaactgtaaagctgcaatgaattttttccaaagcgtgccagaatgtgaacaccaccaaaaagataaagaagaactttcattctcagaagtagaagaactatttcttcagacaacttttgacaagatggactttttaaccattgtgagagaatgtggtatagaaaagcaccagtccagtattggcttctctgtccaccagaatctcaaggaatcactggatcgctgtcttctgggattatcagaacagcttctgaataattactcatctgagattacaaattcagaaactcttgtccggtgttcacgtcttttggtgggtgtccttggctgctactgttacatgggtgtaatagctgaagaggaagcatataagtcagaattattccagaaagccaagtctctaatgcaatgtgcaggagaaagtatcactctgtttaaaaataagacaaatgaggaattcagaattggttccttgagaaatatgatgcagctatgtacacgttgcttgagcaactgtaccaagaagagtccaaataagattgcatctggctttttcctgcgattgttaacatcaaagctaatgaatgacattgcagatatttgtaaaagtttagcatccttcatcaaaaagccatttgaccgtggagaagtagaatcaatggaagatgatactaatggaaatctaatggaggtggaggatcagtcatccatgaatctatttaacgattaccctgatagtagtgttagtgatgcaaacgaacctggagagagccaaagtaccataggtgccattaatcctttagctgaagaatatctgtcaaagcaagatctacttttcttagacatgctcaagttcttgtgtttgtgtgtaactactgctcagaccaatactgtgtcctttagggcagctgatattcggaggaaattgttaatgttaattgattctagcacgctagaacctaccaaatccctccacctgcatatgtatctaatgcttttaaaggagcttcctggagaagagtaccccttgccaatggaagatgttcttgaacttctgaaaccactatccaatgtgtgttctttgtatcgtcgtgaccaagatgtttgtaaaactattttaaaccatgtccttcatgtagtgaaaaacctaggtcaaagcaatatggactctgagaacacaagggatgctcaaggacagtttcttacagtaattggagcattttggcatctaacaaaggagaggaaatatatattctctgtaagaatggccctagtaaattgccttaaaactttgcttgaggctgatccttattcaaaatgggccattcttaatgtaatgggaaaagactttcctgtaaatgaagtatttacacaatttcttgctgacaatcatcaccaagttcgcatgttggctgcagagtcaatcaatagattgttccaggacacgaagggagattcttccaggttactgaaagcacttcctttgaagcttcagcaaacagcttttgaaaatgcatacttgaaagctcaggaaggaatgagagaaatgtcccatagtgctgagaaccctgaaactttggatgaaatttataatagaaaatctgttttactgacgttgatagctgtggttttatcctgtagccctatctgcgaaaaacaggctttgtttgccctgtgtaaatctgtgaaagagaatggattagaacctcaccttgtgaaaaaggttttagagaaagtttctgaaacttttggatatagacgtttagaagactttatggcatctcatttagattatctggttttggaatggctaaatcttcaagatactgaatacaacttatcttcttttccttttattttattaaactacacaaatattgaggatttctatagatcttgttataaggttttgattccacatctggtgattagaagtcattttgatgaggtgaagtccattgctaatcagattcaagaggactggaaaagtcttctaacagactgctttccaaagattcttgtaaatattcttccttattttgcctatgagggtaccagagacagtgggatggcacagcaaagagagactgctaccaaggtctatgatatgcttaaaagtgaaaacttattgggaaaacagattgatcacttattcattagtaatttaccagagattgtggtggagttattgatgacgttacatgagccagcaaattctagtgccagtcagagcactgacctctgtgacttttcaggggatttggatcctgctcctaatccacctcattttccatcgcatgtgattaaagcaacatttgcctatatcagcaattgtcataaaaccaagttaaaaagcattttagaaattctttccaaaagccctgattcctatcagaaaattcttcttgccatatgtgagcaagcagctgaaacaaataatgtttataagaagcacagaattcttaaaatatatcacctgtttgttagtttattactgaaagatataaaaagtggcttaggaggagcttgggcctttgttcttcgagacgttatttatactttgattcactatatcaaccaaaggccttcttgtatcatggatgtgtcattacgtagcttctccctttgttgtgacttattaagtcaggtttgccagacagccgtgacttactgtaaggatgctctagaaaaccatcttcatgttattgttggtacacttataccccttgtgtatgagcaggtggaggttcagaaacaggtattggacttgttgaaatacttagtgatagataacaaggataatgaaaacctctatatcacgattaagcttttagatccttttcctgaccatgttgtttttaaggatttgcgtattactcagcaaaaaatcaaatacagtagaggacccttttcactcttggaggaaattaaccattttctctcagtaagtgtttatgatgcacttccattgacaagacttgaaggactaaaggatcttcgaagacaactggaactacataaagatcagatggtggacattatgagagcttctcaggataatccgcaagatgggattatggtgaaactagttgtcaatttgttgcagttatccaagatggcaataaaccacactggtgaaaaagaagttctagaggctgttggaagctgcttgggagaagtgggtcctatagatttctctaccatagctatacaacatagtaaagatgcatcttataccaaggcccttaagttatttgaagataaagaacttcagtggaccttcataatgctgacctacctgaataacacactggtagaagattgtgtcaaagttcgatcagcagctgttacctgtttgaaaaacattttagccacaaagactggacatagtttctgggagatttataagatgacaacagatccaatgctggcctatctacagccttttagaacatcaagaaaaaagtttttagaagtacccagatttgacaaagaaaacccttttgaaggcctggatgatataaatctgtggattcctctaagtgaaaatcatgacatttggataaagacactgacttgtgcttttttggacagtggaggcacaaaatgtgaaattcttcaattattaaagccaatgtgtgaagtgaaaactgacttttgtcagactgtacttccatacttgattcatgatattttactccaagatacaaatgaatcatggagaaatctgctttctacacatgttcagggatttttcaccagctgtcttcgacacttctcgcaaacgagccgatccacaacccctgcaaacttggattcagagtcagagcactttttccgatgctgtttggataaaaaatcacaaagaacaatgcttgctgttgtggactacatgagaagacaaaagagaccttcttcaggaacaatttttaatgatgctttctggctggatttaaattatctagaagttgccaaggtagctcagtcttgtgctgctcactttacagctttactctatgcagaaatctatgcagataagaaaagtatggatgatcaagagaaaagaagtcttgcatttgaagaaggaagccagagtacaactatttctagcttgagtgaaaaaagtaaagaagaaactggaataagtttacaggatcttctcttagaaatctacagaagtataggggagccagatagtttgtatggctgtggtggagggaagatgttacaacccattactagactacgaacatatgaacacgaagcaatgtggggcaaagccctagtaacatatgacctcgaaacagcaatcccctcatcaacacgccaggcaggaatcattcaggccttgcagaatttgggactctgccatattctttccgtctatttaaaaggattggattatgaaaataaagactggtgtcctgaactagaagaacttcattaccaagcagcatggaggaatatgcagtgggaccattgcacttccgtcagcaaagaagtagaaggaaccagttaccatgaatcattgtacaatgctctacaatctctaagagacagagaattctctacattttatgaaagtctcaaatatgccagagtaaaagaagtggaagagatgtgtaagcgcagccttgagtctgtgtattcgctctatcccacacttagcaggttgcaggccattggagagctggaaagcattggggagcttttctcaagatcagtcacacatagacaactctctgaagtatatattaagtggcagaaacactcccagcttctcaaggacagtgattttagttttcaggagcctatcatggctctacgcacagtcattttggagatcctgatggaaaaggaaatggacaactcacaaagagaatgtattaaggacattctcaccaaacaccttgtagaactctctatactggccagaactttcaagaacactcagctccctgaaagggcaatatttcaaattaaacagtacaattcagttagctgtggagtctctgagtggcagctggaagaagcacaagtattctgggcaaaaaaggagcagagtcttgccctgagtattctcaagcaaatgatcaagaagttggatgccagctgtgcagcgaacaatcccagcctaaaacttacatacacagaatgtctgagggtttgtggcaactggttagcagaaacgtgcttagaaaatcctgcggtcatcatgcagacctatctagaaaaggcagtagaagttgctggaaattatgatggagaaagtagtgatgagctaagaaatggaaaaatgaaggcatttctctcattagcccggttttcagatactcaataccaaagaattgaaaactacatgaaatcatcggaatttgaaaacaagcaagctctcctgaaaagagccaaagaggaagtaggtctccttagggaacataaaattcagacaaacagatacacagtaaaggttcagcgagagctggagttggatgaattagccctgcgtgcactgaaagaggatcgtaaacgcttcttatgtaaagcagttgaaaattatatcaactgcttattaagtggagaagaacatgatatgtgggtattccgactttgttccctctggcttgaaaattctggagtttctgaagtcaatggcatgatgaagagagacggaatgaagattccaacatataaatttttgcctcttatgtaccaattggctgctagaatggggaccaagatgatgggaggcctaggatttcatgaagtcctcaataatctaatctctagaatttcaatggatcacccccatcacactttgtttattatactggccttagcaaatgcaaacagagatgaatttctgactaaaccagaggtagccagaagaagcagaataactaaaaatgtgcctaaacaaagctctcagcttgatgaggatcgaacagaggctgcaaatagaataatatgtactatcagaagtaggagacctcagatggtcagaagtgttgaggcactttgtgatgcttatattatattagcaaacttagatgccactcagtggaagactcagagaaaaggcataaatattccagcagaccagccaattactaaacttaagaatttagaagatgttgttgtccctactatggaaattaaggtggaccacacaggagaatatggaaatctggtgactatacagtcatttaaagcagaatttcgcttagcaggaggtgtaaatttaccaaaaataatagattgtgtaggttccgatggcaaggagaggagacagcttgttaagggccgtgatgacctgagacaagatgctgtcatgcaacaggtcttccagatgtgtaatacattactgcagagaaacacggaaactaggaagaggaaattaactatctgtacttataaggtggttcccctctctcagcgaagtggtgttcttgaatggtgcacaggaactgtccccattggtgaatttcttgttaacaatgaagatggtgctcataaaagatacaggccaaatgatttcagtgcctttcagtgccaaaagaaaatgatggaggtgcaaaaaaagtcttttgaagagaaatatgaagtcttcatggatgtttgccaaaattttcaaccagttttccgttacttctgcatggaaaaattcttggatccagctatttggtttgagaagcgattggcttatacgcgcagtgtagctacttcttctattgttggttacatacttggacttggtgatagacatgtacagaatatcttgataaatgagcagtcagcagaacttgtacatatagatctaggtgttgcttttgaacagggcaaaatccttcctactcctgagacagttccttttagactcaccagagatattgtggatggcatgggcattacgggtgttgaaggtgtcttcagaagatgctgtgagaaaaccatggaagtgatgagaaactctcaggaaactctgttaaccattgtagaggtccttctatatgatccactctttgactggaccatgaatcctttgaaagctttgtatttacagcagaggccggaagatgaaactgagcttcaccctactctgaatgcagatgaccaagaatgcaaacgaaatctcagtgatattgaccagagtttcaacaaagtagctgaacgtgtcttaatgagactacaagagaaactgaaaggagtggaagaaggcactgtgctcagtgttggtggacaagtgaatttgctcatacagcaggccatagaccccaaaaatctcagccgacttttcccaggatggaaagcttgggtgtgatcttcagtatatgaattaccctttcattcagcctttagaaattatattttagcctttatttttaacctgccaacatactttaagtagggattaatatttaagtgaactattgtgggtttttttgaatgttggttttaatacttgatttaatcaccactcaaaaatgttttgatggtcttaaggaacatctctgctttcactctttagaaataatggtcattcgggctgggcgcagcggctcacgcctgtaatcccagcactttgggaggccgaggtgagcggatcacaaggtcaggagttcgagaccagcctggccaagagaccagcctggccagtatggtgaaaccctgtctctactaaaaatacaaaaattagccgagcatggtggcgggcacctgtaatcccagctactcgagaggctgaggcaggagaatctcttgaacctgggaggtgaaggttgctgtgggccaaaatcatgccattgcactccagcctgggtgacaagagcgaaactccatctcaaaaaaaaaaaaaaaaaaacagaaacgtatttggatttttcctagtaagatcactcagtgttactaaataatgaagttgttatggagaacaaatttcaaagacacagttagtgtagttactatttttttaagtgtgtattaaaacttctcattctattctctttatcttttaagcccttctgtactgtccatgtatgttatctttctgtgataacttcatagattgccttctagttcatgaattctcttgtcagatgtatataatctcttttaccctatccattgggcttcttctttcagaaattgtttttcatttctaattatgcatcatttttcagatctctgtttcttgatgtcatttttaatgtttttttaatgttttttatgtcactaattattttaaatgtctgtacttgatagacactgtaatagttctattaaatttagttcctgctgtttatatctgttgatttttgtatttgataggctgttcatccagttttgtctttttgaaaagtgagtttattttcagcaaggctttatctatgggaatcttgagtgtctgtttatgtcatattcccagggctgttgctgcacacaagcccattcttattttaatttcttggctttagggtttccatacctgaagtgtagcataaatactgataggagatttcccaggccaaggcaaacacacttcctcctcatctccttgtgctagtgggcagaatatttgattgatgcctttttcactgagagtataagcttccatgtgtcccacctttatggcaggggtggaaggaggtacatttaattcccactgcctgcctttggcaagccctgggttctttgctccccatatagatgtctaagctaaaagccgtgggttaatgagactggcaaattgttccaggacagctacagcatcagctcacatattcacctctctggtttttcattcccctcatttttttctgagacagagtcttgctctgtcacccaggctggagtgcagtggcatgatctcagctcactgaaacctctgcctcctgggttcaagcaattctcctgcctcagcctcccgagtagctgggactacaggcgtgtgccaacacgcccggctaattttttgtatttttattagagacggagtttcaccgtgttagccaggatggtctcgatcgcttgacctcgtgatccaccctcctcggcctcccaaagtgctgggattacaggtgtgagccaccgcgcccggcctcattcccctcatttttgaccgtaaggatttcccctttcttgtaagttctgctatgtatttaaaagaatgttttctacattttatccagcatttctctgtgttctgttggaagggaagggcttaggtatctagtttgatacataggtagaagtggaacatttctctgtcccccagctgtcatcatataagataaacatcagataaaaagccacctgaaagtaaaactactgactcgtgtattagtgagtataatctcttctccatccttaggaaaatgttcatcccagctgcggagattaacaaatgggtgattgagctttctcctcgtatttggaccttgaaggttatataaatttttttcttatgaagagttggcatttctttttattgccaatggcaggcactcattcatatttgatctcctcaccttcccctcccctaaaaccaatctccagaactttttggactataaatttcttggtttgacttctggagaactgttcagaatattactttgcatttcaaattacaaacttaccttggtgtatctttttcttacaagctgcctaaatgaatatttggtatatattggtagttttattactatagtaaatcaaggaaatgcagtaaacttaaaatgtctttaagaaagccctgaaatcttcatgggtgaaattagaaattatcaactagataatagtatagataaatgaatttgtagctaattcttgctagttgttgcatccagagagctttgaataacatcattaatctactctttagccttgcatggtatgctatgaggctcctgttctgttcaagtattctaatcaatggctttgaaaagtttatcaaatttacatacagatcacaagcctaggagaaataactaattcacagatgacagaattaagattataaaagattttttttttgtaattttagtagagacagggttgccattgtattccagccttggcgacagagcaagactctgcctcaaaaaaaaaaaaaaaaaggttttggcaagctggaactctttctgcaaatgactaagatagaaaactgccaaggacaaatgaggagtagttagattttgaaaatattaatcatagaatagttgttgtatgctaagtcactgacccatattatgtacagcatttctgatctttactttgcaagattagtgatactatcccaatacactgctggagaaatcagaatttggagaaataagttgtccaaggcaagaagatagtaaattataagtacaagtgtaatatggacagtatctaacttgaaaagatttcaggcgaaaagaatctggggtttgccagtcagttgctcaaaaggtcaatgaaaaccaaatagtgaagctatcagagaagctaataaattatagactgcttgaacagttgtgtccagattaagggagataatagctttcccaccctactttgtgcaggtcatacctccccaaagtgtttacctaatcagtaggttcacaaactcttggtcattatagtatatgcctaaaatgtatgcacttaggaatgctaaaaatttaaatatggtctaaagcaaataaaagcaaagaggaaaaactttggacagcgtaaagactagaatagtcttttaaaaagaaagccagtatattggtttgaaatatagagatgtgtcccaatttcaagtattttaattgcaccttaatgaaattatctattttctatagattttagtactattgaatgtattactttactgttacctgaatttattataaagtgtttttgaataaataattctaaaagc

SEQ ID NO: 16 - protein, 3056 aa, Homo sapiens
MSLVLNDLLICCRQLEHDRATERKKEVEKFKRLIRDPETIKHLDRHSDSKQGKYLNWDAVFRFLQKYIQKETECLRIAKPNVSASTQASRQKKMQEISSLVKYFIKCANRRAPRLKCQELLNYIMDTVKDSSNGAIYGADCSNILLKDILSVRKYWCEISQQQWLELFSVYFRLYLKPSQDVHRVLVARIIHAVTKGCCSQTDGLNSKFLDFFSKAIQCARQEKSSSGLNHILAALTIFLKTLAVNFRIRVCELGDEILPTLLYIWTQHRLNDSLKEVIIELFQLQIYIHHPKGAKTQEKGAYESTKWRSILYNLYDLLVNEISHIGSRGKYSSGFRNIAVKENLIELMADICHQVFNEDTRSLEISQSYTTTQRESSDYSVPCKRKKIELGWEVIKDHLQKSQNDFDLVPWLQIATQLISKYPASLPNCELSPLLMILSQLLPQQRHGERTPYVLRCLTEVALCQDKRSNLESSQKSDLLKLWNKIWCITFRGISSEQIQAENFGLLGAIIQGSLVEVDREFWKLFTGSACRPSCPAVCCLTLALTTSIVPGTVKMGIEQNMCEVNRSFSLKESIMKWLLFYQLEGDLENSTEVPPILHSNFPHLVLEKILVSLTMKNCKAAMNFFQSVPECEHHQKDKEELSFSEVEELFLQTTFDKMDFLTIVRECGIEKHQSSIGFSVHQNLKESLDRCLLGLSEQLLNNYSSEITNSETLVRCSRLLVGVLGCYCYMGVIAEEEAYKSELFQKAKSLMQCAGESITLFKNKTNEEFRIGSLRNMMQLCTRCLSNCTKKSPNKIASGFFLRLLTSKLMNDIADICKSLASFIKKPFDRGEVESMEDDTNGNLMEVEDQSSMNLFNDYPDSSVSDANEPGESQSTIGAINPLAEEYLSKQDLLFLDMLKFLCLCVTTAQTNTVSFRAADIRRKLLMLIDSSTLEPTKSLHLHMYLMLLKELPGEEYPLPMEDVLELLKPLSNVCSLYRRDQDVCKTILNHVLHVVKNLGQSNMDSENTRDAQGQFLTVIGAFWHLTKERKYIFSVRMALVNCLKTLLEADPYSKWAILNVMGKDFPVNEVFTQFLADNHHQVRMLAAESINRLFQDTKGDSSRLLKALPLKLQQTAFENAYLKAQEGMREMSHSAENPETLDEIYNRKSVLLTLIAVVLSCSPICEKQALFALCKSVKENGLEPHLVKKVLEKVSETFGYRRLEDFMASHLDYLVLEWLNLQDTEYNLSSFPFILLNYTNIEDFYRSCYKVLIPHLVIRSHFDEVKSIANQIQEDWKSLLTDCFPKILVNILPYFAYEGTRDSGMAQQRETATKVYDMLKSENLLGKQIDHLFISNLPEIVVELLMTLHEPANSSASQSTDLCDFSGDLDPAPNPPHFPSHVIKATFAYISNCHKTKLKSILEILSKSPDSYQKILLAICEQAAETNNVYKKHRILKIYHLFVSLLLKDIKSGLGGAWAFVLRDVIYTLIHYINQRPSCIMDVSLRSFSLCCDLLSQVCQTAVTYCKDALENHLHVIVGTLIPLVYEQVEVQKQVLDLLKYLVIDNKDNENLYITIKLLDPFPDHVVFKDLRITQQKIKYSRGPFSLLEEINHFLSVSVYDALPLTRLEGLKDLRRQLELHKDQMVDIMRASQDNPQDGIMVKLVVNLLQLSKMAINHTGEKEVLEAVGSCLGEVGPIDFSTIAIQHSKDASYTKALKLFEDKELQWTFIMLTYLNNTLVEDCVKVRSAAVTCLKNILATKTGHSFWEIYKMTTDPMLAYLQPFRTSRKKFLEVPRFDKENPFEGLDDINLWIPLSENHDIWIKTLTCAFLDSGGTKCEILQLLKPMCEVKTDFCQTVLPYLIHDILLQDTNESWRNLLSTHVQGFFTSCLRHFSQTSRSTTPANLDSESEHFFRCCLDKKSQRTMLAVVDYMRRQKRPSSGTIFNDAFWLDLNYLEVAKVAQSCAAHFTALLYAEIYADKKSMDDQEKRSLAFEEGSQSTTISSLSEKSKEETGISLQDLLLEIYRSIGEPDSLYGCGGGKMLQPITRLRTYEHEAMWGKALVTYDLETAIPSSTRQAGIIQALQNLGLCHILSVYLKGLDYENKDWCPELEELHYQAAWRNMQWDHCTSVSKEVEGTSYHESLYNALQSLRDREFSTFYESLKYARVKEVEEMCKRSLESVYSLYPTLSRLQAIGELESIGELFSRSVTHRQLSEVYIKWQKHSQLLKDSDFSFQEPIMALRTVILEILMEKEMDNSQRECIKDILTKHLVELSILARTFKNTQLPERAIFQIKQYNSVSCGVSEWQLEEAQVFWAKKEQSLALSILKQMIKKLDASCAANNPSLKLTYTECLRVCGNWLAETCLENPAVIMQTYLEKAVEVAGNYDGESSDELRNGKMKAFLSLARFSDTQYQRIENYMKSSEFENKQALLKRAKEEVGLLREHKIQTNRYTVKVQRELELDELALRALKEDRKRFLCKAVENYINCLLSGEEHDMWVFRLCSLWLENSGVSEVNGMMKRDGMKIPTYKFLPLMYQLAARMGTKMMGGLGFHEVLNNLISRISMDHPHHTLFIILALANANRDEFLTKPEVARRSRITKNVPKQSSQLDEDRTEAANRIICTIRSRRPQMVRSVEALCDAYIILANLDATQWKTQRKGINIPADQPITKLKNLEDVVVPTMEIKVDHTGEYGNLVTIQSFKAEFRLAGGVNLPKIIDCVGSDGKERRQLVKGRDDLRQDAVMQQVFQMCNTLLQRNTETRKRKLTICTYKVVPLSQRSGVLEWCTGTVPIGEFLVNNEDGAHKRYRPNDFSAFQCQKKMMEVQKKSFEEKYEVFMDVCQNFQPVFRYFCMEKFLDPAIWFEKRLAYTRSVATSSIVGYILGLGDRHVQNILINEQSAELVHIDLGVAFEQGKILPTPETVPFRLTRDIVDGMGITGVEGVFRRCCEKTMEVMRNSQETLLTIVEVLLYDPLFDWTMNPLKALYLQQRPEDETELHPTLNADDQECKRNLSDIDQSFNKVAERVLMRLQEKLKGVEEGTVLSVGGQVNLLIQQAIDPKNLSRLFPGWKAWV

SEQ ID NO: 17 - DNA, 3717 bp, Homo sapiens
  CDS (365)..(1939)
gaacagcgaagacagcgtgagcctgggccgttgcctcgaggctctcgcccggcttctcttgccgacccgccacgtttgtttggatttaatcttcaggttgccggcgcccgcccgcccgctggcctcgcggtgtgagagggaagcacccgtgcctgtggctggtggctggcgcctggagggtccgcacacccgcccggccgcgccgcttgcccgcggcagccgcgtccctgaaccgcggagtcgtgtttgtgtttgacccgcgggcgccggtggcgcgcggccgaggccggtgtcggcggggcggggcggtcgcggcggaggcagaggaagagggagcgggagctctgcgaggccgggcgccgccatggaactgggcccggagcccccgcaccgccgccgcctgctcttcgcctgcagcccccctcccgcgtcgcagcccgtcgtgaaggcgctatttggcgcttcagccgccgggggactgtcgcctgtcaccaacctgaccgtcactatggaccagctgcagggtctgggcagtgattatgagcaaccactggaggtgaagaacaacagtaatctgcagagaatgggctcctccgagtcaacagattcaggtttctgtctagattctcctgggccattggacagtaaagaaaaccttgaaaatcctatgagaagaatacattccctacctcagaagctgttgggatgtagtccagctctgaagaggagccattctgattctcttgaccatgacatctttcagctcatcgacccagatgagaacaaggaaaatgaagcctttgagtttaagaagccagtaagacctgtatctcgtggctgcctgcactctcatggactccaggagggtaaagatctcttcacacagaggcagaactctgccccagctcggatgctttcctcaaatgaaagagatagcagtgaaccagggaatttcattcctctttttacaccccagtcacctgtgacagccactttgtctgatgaggatgatggcttcgtggaccttctcgatggagagaatctgaagaatgaggaggagaccccctcgtgcatggcaagcctctggacagctcctctcgtcatgagaactacaaaccttgacaaccgatgcaagctgtttgactccccttccctgtgtagctccagcactcggtcagtgttgaagagaccagaacgatctcaagaggagtctccacctggaagtacaaagaggaggaagagcatgtctggggccagccccaaagagtcaactaatccagagaaggcccatgagactcttcatcagtctttatccctggcatcttcccccaaaggaaccattgagaacattttggacaatgacccaagggaccttataggagacttctccaagggttatctctttcatacagttgctgggaaacatcaggatttaaaatacatctctccagaaattatggcatctgttttgaatggcaagtttgccaacctcattaaagagtttgttatcatcgactgtcgatacccatatgaatacgagggaggccacatcaagggtgcagtgaacttgcacatggaagaagaggttgaagacttcttattgaagaagcccattgtacctactgatggcaagcgtgtcattgttgtgtttcactgcgagttttcttctgagagaggtccccgcatgtgccggtatgtgagagagagagatcgcctgggtaatgaataccccaaactccactaccctgagctgtatgtcctgaaggggggatacaaggagttctttatgaaatgccagtcttactgtgagccccctagctaccggcccatgcaccacgaggactttaaagaagacctgaagaagttccgcaccaagagccggacctgggcaggggagaagagcaagagggagatgtacagtcgtctgaagaagctctgagggcggcaggaccagccagcagcagcccaagcttccctccatccccctttaccctctttgctgcagagaaacttaagcaaaggggacagctgtgtgacatttggagagggggcctgggacttccatgccttaaacctacctcccacactcccaaggttggagcccagggcatcttgctggctacgcctcttctgtccctgttagacgtcctccgtccatatcagaactgtgccacaatgcagttctgagcaccgtgtcaagctgctctgagccacagtgggatgaaccagccggggccttatcgggctccagccatctcatgaggggagaggagacggaggggagtagagaagttacacagaaatgctgctggccaaatagcaaagacaacctgggaaggaaaggtctttgtgggataatccatatgtttaatttattcaacttcatcaatcactttattttatttttttttctaactcctggagacttattttactgcttcattaggttgaaatactgccattctaggtagggttttattatcccagggactacctcggcttttaatttaaaaaaaaaaaagaagtgggtaagaaaatgcaaacctgttataagttatcggacagaaagctaggtgctctgtcacccccaggaggcgctgtggtactggggctgctgctatttaagccaagaactgaggtcctggtgagagcgttggacccaggcttggctgcctgacataagctaaatctcccagacccaccactggctaccgatatctatttggtgggaggtgtggccctgttcttcctcaccccagttccatgacattggctggtataggagccacagtcaggaaagcacttgaggcagcatctgttgggccacccccggctcagtgctggaatgttgcagtgtaggtttcccagggaaggggggtgggggtaggtgggctccacaggatgggggaggagcatgtccactgagtatcttccttatgttgctgtgatattgatagcttttattttctaatttttaaaaaatggtcatattatgagtcaaagagtatcaaatcagtgttggatggaccacccaagggtgaggagaggggctggaagccctgggcattaggagaagggagtgggtgctggcatggacatgactggatagaattttctcaggagggagcttggtggattttgaaggtaaaactttctgggtttatcatgttttaattttagagacagggagtgatgaatcatcaccggttgtccccttatctaactccataaaagtgggaatttcaaaagaacacctcatccaaggagctggggcagacttcattgattctagagagacctgtttcagtgcctactcatccctgccctctggtgccagcctccttaccatcacggcttcactgaggtgtaggtgggtttttcttaaacaggagacagtctctcccctcttacctcaacttcttggggtgggaatcagtgatactggagatggctagttgctgtgttacgggtttgagttacatttggctataaaacaatcttgttgggaaaaatgtgggggagaggacttcttcctacacgcgcattgagacagattccaactggttaatgatattgtttgtaagaaagagattctgttggttgactgcctaaagagaaaggtgggatggccttcagattataccagcttagctagcattactaaccaactgttggaagctctgaaaataaaagatcttgaacccataaaaaaaaaaa

SEQ ID NO: 18 - protein, 524 aa, Homo sapiens
MELGPEPPHRRRLLFACSPPPASQPVVKALFGASAAGGLSPVTNLTVTMDQLQGLGSDYEQPLEVKNNSNLQRMGSSESTDSGFCLDSPGPLDSKENLENPMRRIHSLPQKLLGCSPALKRSHSDSLDHDIFQLIDPDENKENEAFEFKKPVRPVSRGCLHSHGLQEGKDLFTQRQNSAPARMLSSNERDSSEPGNFIPLFTPQSPVTATLSDEDDGFVDLLDGENLKNEEETPSCMASLWTAPLVMRTTNLDNRCKLFDSPSLCSSSTRSVLKRPERSQEESPPGSTKRRKSMSGASPKESTNPEKAHETLHQSLSLASSPKGTIENILDNDPRDLIGDFSKGYLFHTVAGKHQDLKYISPEIMASVLNGKFANLIKEFVIIDCRYPYEYEGGHIKGAVNLHMEEEVEDFLLKKPIVPTDGKRVIVVFHCEFSSERGPRMCRYVRERDRLGNEYPKLHYPELYVLKGGYKEFFMKCQSYCEPPSYRPMHHEDFKEDLKKFRTKSRTWAGEKSKREMYSRLKKL

SEQ ID NO: 19 - DNA, 13509 bp, Homo sapiens
  CDS (58)..(12444)
ggggcatttccgggtccgggccgagcgggcgcacgcgcgggagcgggactcggcggcatggcgggctccggagccggtgtgcgttgctccctgctgcggctgcaggagaccttgtccgctgcggaccgctgcggtgctgccctggccggtcatcaactgatccgcggcctggggcaggaatgcgtcctgagcagcagccccgcggtgctggcattacagacatctttagttttttccagagatttcggtttgcttgtatttgtccggaagtcactcaacagtattgaatttcgtgaatgtagagaagaaatcctaaagtttttatgtattttcttagaaaaaatgggccagaagatcgcaccttactctgttgaaattaagaacacttgtaccagtgtttatacaaaagatagagctgctaaatgtaaaattccagccctggaccttcttattaagttacttcagacttttagaagttctagactcatggatgaatttaaaattggagaattatttagtaaattctatggagaacttgcattgaaaaaaaaaataccagatacagttttagaaaaagtatatgagctcctaggattattgggtgaagttcatcctagtgagatgataaataatgcagaaaacctgttccgcgcttttctgggtgaacttaagacccagatgacatcagcagtaagagagcccaaactacctgttctggcaggatgtctgaaggggttgtcctcacttctgtgcaacttcactaagtccatggaagaagatccccagacttcaagggagatttttaattttgtactaaaggcaattcgtcctcagattgatctgaagagatatgctgtgccctcagctggcttgcgcctatttgccctgcatgcatctcagtttagcacctgccttctggacaactacgtgtctctatttgaagtcttgttaaagtggtgtgcccacacaaatgtagaattgaaaaaagctgcactttcagccctggaatcctttctgaaacaggtttctaatatggtggcgaaaaatgcagaaatgcataaaaataaactgcagtactttatggagcagttttatggaatcatcagaaatgtggattcgaacaacaaggagttatctattgctatccgtggatatggactttttgcaggaccgtgcaaggttataaacgcaaaagatgttgacttcatgtacgttgagctcattcagcgctgcaagcagatgttcctcacccagacagacactggtgacgaccgtgtttatcagatgccaagcttcctccagtctgttgcaagcgtcttgctgtaccttgacacagttcctgaggtgtatactccagttctggagcacctcgtggtgatgcagatagacagtttcccacagtacagtccaaaaatgcagctggtgtgttgcagagccatagtgaaggtgttcctagctttggcagcaaaagggccagttctcaggaattgcattagtactgtggtgcatcagggtttaatcagaatatgttctaaaccagtggtccttccaaagggccctgagtctgaatctgaagaccaccgtgcttcaggggaagtcagaactggcaaatggaaggtgcccacatacaaagactacgtggatctcttcagacatctcctgagctctgaccagatgatggattctattttagcagatgaagcatttttctctgtgaattcctccagtgaaagtctgaatcatttactttatgatgaatttgtaaaatccgttttgaagattgttgagaaattggatcttacacttgaaatacagactgttggggaacaagagaatggagatgaggcgcctggtgtttggatgatcccaacttcagatccagcggctaacttgcatccagctaaacctaaagatttttcggctttcattaacctggtggaattttgcagagagattctccctgagaaacaagcagaattttttgaaccatgggtgtactcattttcatatgaattaattttgcaatctacaaggttgcccctcatcagtggtttctacaaattgctttctattacagtaagaaatgccaagaaaataaaatatttcgagggagttagtccaaagagtctgaaacactctcctgaagacccagaaaagtattcttgctttgctttatttgtgaaatttggcaaagaggtggcagttaaaatgaagcagtacaaagatgaacttttggcctcttgtttgacctttcttctgtccttgccacacaacatcattgaactcgatgttagagcctacgttcctgcactgcagatggctttcaaactgggcctgagctatacccccttggcagaagtaggcctgaatgctctagaagaatggtcaatttatattgacagacatgtaatgcagccttattacaaagacattctcccctgcctggatggatacctgaagacttcagccttgtcagatgagaccaagaataactgggaagtgtcagctctttctcgggctgcccagaaaggatttaataaagtggtgttaaagcatctgaagaagacaaagaacctttcatcaaacgaagcaatatccttagaagaaataagaattagagtagtacaaatgcttggatctctaggaggacaaataaacaaaaatcttctgacagtcacgtcctcagatgagatgatgaagagctatgtggcctgggacagagagaagcggctgagctttgcagtgccctttagagagatgaaacctgtcattttcctggatgtgttcctgcctcgagtcacagaattagcgctcacagccagtgacagacaaactaaagttgcagcctgtgaacttttacatagcatggttatgtttatgttgggcaaagccacgcagatgccagaagggggacagggagccccacccatgtaccagctctataagcggacgtttcctgtgctgcttcgacttgcgtgtgatgttgatcaggtgacaaggcaactgtatgagccactagttatgcagctgattcactggttcactaacaacaagaaatttgaaagtcaggatactgttgccttactagaagctatattggatggaattgtggaccctgttgacagtactttaagagatttttgtggtcggtgtattcgagaattccttaaatggtccattaagcaaataacaccacagcagcaggagaagagtccagtaaacaccaaatcgcttttcaagcgactttatagccttgcgcttcaccccaatgctttcaagaggctgggagcatcacttgcctttaataatatctacagggaattcagggaagaagagtctctggtggaacagtttgtgtttgaagccttggtgatatacatggagagtctggccttagcacatgcagatgagaagtccttaggtacaattcaacagtgttgtgatgccattgatcacctatgccgcatcattgaaaagaagcatgtttctttaaataaagcaaagaaacgacgtttgccgcgaggatttccaccttccgcatcattgtgtttattggatctggtcaagtggcttttagctcattgtgggaggccccagacagaatgtcgacacaaatccattgaactcttttataaattcgttcctttattgccaggcaacagatcccctaatttgtggctgaaagatgttctcaaggaagaaggtgtctcttttctcatcaacacctttgaggggggtggctgtggccagccctcgggcatcctggcccagcccaccctcttgtaccttcgggggccattcagcctgcaggccacgctatgctggctggacctgctcctggccgcgttggagtgctacaacacgttcattggcgagagaactgtaggagcgctccaggtcctaggtactgaagcccagtcttcacttttgaaagcagtggctttcttcttagaaagcattgccatgcatgacattatagcagcagaaaagtgctttggcactggggcagcaggtaacagaacaagcccacaagagggagaaaggtacaactacagcaaatgcaccgttgtggtccggattatggagtttaccacgactctgctaaacacctccccggaaggatggaagctcctgaagaaggacttgtgtaatacacacctgatgagagtcctggtgcagacgctgtgtgagcccgcaagcataggtttcaacatcggagacgtccaggttatggctcatcttcctgatgtttgtgtgaatctgatgaaagctctaaagatgtccccatacaaagatatcctagagacccatctgagagagaaaataacagcacagagcattgaggagctttgtgccgtcaacttgtatggccctgacgcgcaagtggacaggagcaggctggctgctgttgtgtctgcctgtaaacagcttcacagagctgggcttctgcataatatattaccgtctcagtccacagatttgcatcattctgttggcacagaacttctttccctggtttataaaggcattgcccctggagatgagagacagtgtctgccttctctagacctcagttgtaagcagctggccagcggacttctggagttagcctttgcttttggaggactgtgtgagcgccttgtgagtcttctcctgaacccagcggtgctgtccacggcgtccttgggcagctcacagggcagcgtcatccacttctcccatggggagtatttctatagcttgttctcagaaacgatcaacacggaattattgaaaaatctggatcttgctgtattggagctcatgcagtcttcagtggataataccaaaatggtgagtgccgttttgaacggcatgttagaccagagcttcagggagcgagcaaaccagaaacaccaaggactgaaacttgcgactacaattctgcaacactggaagaagtgtgattcatggtgggccaaagattcccctctcgaaactaaaatggcagtgctggccttactggcaaaaattttacagattgattcatctgtatcttttaatacaagtcatggttcattccctgaagtctttacaacatatattagtctacttgctgacacaaagctggatctacatttaaagggccaagctgtcactcttcttccattcttcaccagcctcactggaggcagtctggaggaacttagacgtgttctggagcagctcatcgttgctcacttccccatgcagtccagggaatttcctccaggaactccgcggttcaataattatgtggactgcatgaaaaagtttctagatgcattggaattatctcaaagccctatgttgttggaattgatgacagaagttctttgtcgggaacagcagcatgtcatggaagaattatttcaatccagtttcaggaggattgccagaaggggttcatgtgtcacacaagtaggccttctggaaagcgtgtatgaaatgttcaggaaggatgacccccgcctaagtttcacacgccagtcctttgtggaccgctccctcctcactctgctgtggcactgtagcctggatgctttgagagaattcttcagcacaattgtggtggatgccattgatgtgttgaagtccaggtttacaaagctaaatgaatctacctttgatactcaaatcaccaagaagatgggctactataagattctagacgtgatgtattctcgccttcccaaagatgatgttcatgctaaggaatcaaaaattaatcaagttttccatggctcgtgtattacagaaggaaatgaacttacaaagacattgattaaattgtgctacgatgcatttacagagaacatggcaggagagaatcagctgctggagaggagaagactttaccattgtgcagcatacaactgcgccatatctgtcatctgctgtgtcttcaatgagttaaaattttaccaaggttttctgtttagtgaaaaaccagaaaagaacttgcttatttttgaaaatctgatcgacctgaagcgccgctataattttcctgtagaagttgaggttcctatggaaagaaagaaaaagtacattgaaattaggaaagaagccagagaagcagcaaatggggattcagatggtccttcctatatgtcttccctgtcatatttggcagacagtaccctgagtgaggaaatgagtcaatttgatttctcaaccggagttcagagctattcatacagctcccaagaccctagacctgccactggtcgttttcggagacgggagcagcgggaccccacggtgcatgatgatgtgctggagctggagatggacgagctcaatcggcatgagtgcatggcgcccctgacggccctggtcaagcacatgcacagaagcctgggcccgcctcaaggagaagaggattcagtgccaagagatcttccttcttggatgaaattcctccatggcaaactgggaaatccaatagtaccattaaatatccgtctcttcttagccaagcttgttattaatacagaagaggtctttcgcccttacgcgaagcactggcttagccccttgctgcagctggctgcttctgaaaacaatggaggagaaggaattcactacatggtggttgagatagtggccactattctttcatggacaggcttggccactccaacaggggtccctaaagatgaagtgttagcaaatcgattgcttaatttcctaatgaaacatgtctttcatccaaaaagagctgtgtttagacacaaccttgaaattataaagacccttgtcgagtgctggaaggattgtttatccatcccttataggttaatatttgaaaagttttccggtaaagatcctaattctaaagacaactcagtagggattcaattgctaggcatcgtgatggccaatgacctgcctccctatgacccacagtgtggcatccagagtagcgaatacttccaggctttggtgaataatatgtcctttgtaagatataaagaagtgtatgccgctgcagcagaagttctaggacttatacttcgatatgttatggagagaaaaaacatactggaggagtctctgtgtgaactggttgcgaaacaattgaagcaacatcagaatactatggaggacaagtttattgtgtgcttgaacaaagtgaccaagagcttccctcctcttgcagacaggttcatgaatgctgtgttctttctgctgccaaaatttcatggagtgttgaaaacactctgtctggaggtggtactttgtcgtgtggagggaatgacagagctgtacttccagttaaagagcaaggacttcgttcaagtcatgagacatagagatgatgaaagacaaaaagtatgtttggacataatttataagatgatgccaaagttaaaaccagtagaactccgagaacttctgaaccccgttgtggaattcgtttcccatccttctacaacatgtagggaacaaatgtataatattctcatgtggattcatgataattacagagatccagaaagtgagacagataatgactcccaggaaatatttaagttggcaaaagatgtgctgattcaaggattgatcgatgagaaccctggacttcaattaattattcgaaatttctggagccatgaaactaggttaccttcaaataccttggaccggttgctggcactaaattccttatattctcctaagatagaagtgcactttttaagtttagcaacaaattttctgctcgaaatgaccagcatgagcccagattatccaaaccccatgttcgagcatcctctgtcagaatgcgaatttcaggaatataccattgattctgattggcgtttccgaagtactgttctcactccgatgtttgtggagacccaggcctcccagggcactctccagacccgtacccaggaagggtccctctcagctcgctggccagtggcagggcagataagggccacccagcagcagcatgacttcacactgacacagactgcagatggaagaagctcatttgattggctgaccgggagcagcactgacccgctggtcgaccacaccagtccctcatctgactccttgctgtttgcccacaagaggagtgaaaggttacagagagcacccttgaagtcagtggggcctgattttgggaaaaaaaggctgggccttccaggggacgaggtggataacaaagtgaaaggtgcggccggccggacggacctactacgactgcgcagacggtttatgagggaccaggagaagctcagtttgatgtatgccagaaaaggcgttgctgagcaaaaacgagagaaggaaatcaagagtgagttaaaaatgaagcaggatgcccaggtcgttctgtacagaagctaccggcacggagaccttcctgacattcagatcaagcacagcagcctcatcaccccgttacaggccgtggcccagagggacccaataattgcaaaacagctctttagcagcttgttttctggaattttgaaagagatggataaatttaagacactgtctgaaaaaaacaacatcactcaaaagttgcttcaagacttcaatcgttttcttaataccaccttctctttctttccaccctttgtctcttgtattcaggacattagctgtcagcacgcagccctgctgagcctcgacccagcggctgttagcgctggttgcctggccagcctacagcagcccgtgggcatccgcctgctagaggaggctctgctccgcctgctgcctgctgagctgcctgccaagcgagtccgtgggaaggcccgcctccctcctgatgtcctcagatgggtggagcttgctaagctgtatagatcaattggagaatacgacgtcctccgtgggatttttaccagtgagataggaacaaagcaaatcactcagagtgcattattagcagaagccagaagtgattattctgaagctgctaagcagtatgatgaggctctcaataaacaagactgggtagatggtgagcccacagaagccgagaaggatttttgggaacttgcatcccttgactgttacaaccaccttgctgagtggaaatcacttgaatactgttctacagccagtatagacagtgagaaccccccagacctaaataaaatctggagtgaaccattttatcaggaaacatatctaccttacatgatccgcagcaagctgaagctgctgctccagggagaggctgaccagtccctgctgacatttattgacaaagctatgcacggggagctccagaaggcgattctagagcttcattacagtcaagagctgagtctgctttacctcctgcaagatgatgttgacagagccaaatattacattcaaaatggcattcagagttttatgcagaattattctagtattgatgtcctcttacaccaaagtagactcaccaaattgcagtctgtacaggctttaacagaaattcaggagttcatcagctttataagcaaacaaggcaatttatcatctcaagttccccttaagagacttctgaacacctggacaaacagatatccagatgctaaaatggacccaatgaacatctgggatgacatcatcacaaatcgatgtttctttctcagcaaaatagaggagaagcttacccctcttccagaagataatagtatgaatgtggatcaagatggagaccccagtgacaggatggaagtgcaagagcaggaagaagatatcagctccctgatcaggagttgcaagttttccatgaaaatgaagatgatagacagtgcccggaagcagaacaatttctcacttgctatgaaactactgaaggagctgcataaagagtcaaaaaccagagacgattggctggtgagctgggtgcagagctactgccgcctgagccactgccggagccggtcccagggctgctctgagcaggtgctcactgtgctgaaaacagtctctttgttggatgagaacaacgtgtcaagctacttaagcaaaaatattctggctttccgtgaccagaacattctcttgggtacaacttacaggatcatagcgaatgctctcagcagtgagccagcctgccttgctgaaatcgaggaggacaaggctagaagaatcttagagctttctggatccagttcagaggattcagagaaggtgatcgcgggtctgtaccagagagcattccagcacctctctgaggctgtgcaggcggctgaggaggaggcccagcctccctcctggagctgtgggcctgcagctggggtgattgatgcttacatgacgctggcagatttctgtgaccaacagctgcgcaaggaggaagagaatgcatcagttattgattctgcagaactgcaggcgtatccagcacttgtggtggagaaaatgttgaaagctttaaaattaaattccaatgaagccagattgaagtttcctagattacttcagattatagaacggtatccagaggagactttgagcctcatgacaaaagagatctcttccgttccctgctggcagttcatcagctggatcagccacatggtggccttactggacaaagaccaagccgttgctgttcagcactctgtggaagaaatcactgataactacccgcaggctattgtttatcccttcatcataagcagcgaaagctattccttcaaggatacttctactggtcataagaataaggagtttgtggcaaggattaaaagtaagttggatcaaggaggagtgattcaagattttattaatgccttagatcagctctctaatcctgaactgctctttaaggattggagcaatgatgtaagagctgaactagcaaaaacccctgtaaataaaaaaaacattgaaaaaatgtatgaaagaatgtatgcagccttgggtgacccaaaggctccaggcctgggggcctttagaaggaagtttattcagacttttggaaaagaatttgataaacattttgggaaaggaggttctaaactactgagaatgaagctcagtgacttcaacgacattaccaacatgctacttttaaaaatgaacaaagactcaaagccccctgggaatctgaaagaatgttcaccctggatgagcgacttcaaagtggagttcctgagaaatgagctggagattcccggtcagtatgacggtaggggaaagccattgccagagtaccacgtgcgaatcgccgggtttgatgagcgggtgacagtcatggcgtctctgcgaaggcccaagcgcatcatcatccgtggccatgacgagagggaacaccctttcctggtgaagggtggcgaggacctgcggcaggaccagcgcgtggagcagctcttccaggtcatgaatgggatcctggcccaagactccgcctgcagccagagggccctgcagctgaggacctatagcgttgtgcccatgacctccaggttaggattaattgagtggcttgaaaatactgttaccttgaaggaccttcttttgaacaccatgtcccaagaggagaaggcggcttacctgagtgatcccagggcaccgccgtgtgaatataaagattggctgacaaaaatgtcaggaaaacatgatgttggagcttacatgctaatgtataagggcgctaatcgtactgaaacagtcacgtcttttagaaaacgagaaagtaaagtgcctgctgatctcttaaagcgggccttcgtgaggatgagtacaagccctgaggctttcctggcgctccgctcccacttcgccagctctcacgctctgatatgcatcagccactggatcctcgggattggagacagacatctgaacaactttatggtggccatggagactggcggcgtgatcgggatcgactttgggcatgcgtttggatccgctacacagtttctgccagtccctgagttgatgccttttcggctaactcgccagtttatcaatctgatgttaccaatgaaagaaacgggccttatgtacagcatcatggtacacgcactccgggccttccgctcagaccctggcctgctcaccaacaccatggatgtgtttgtcaaggagccctcctttgattggaaaaattttgaacagaaaatgctgaaaaaaggagggtcatggattcaagaaataaatgttgctgaaaaaaattggtacccccgacagaaaatatgttacgctaagagaaagttagcaggtgccaatccagcagtcattacttgtgatgagctactcctgggtcatgagaaggcccctgccttcagagactatgtggctgtggcacgaggaagcaaagatcacaacattcgtgcccaagaaccagagagtgggctttcagaagagactcaagtgaagtgcctgatggaccaggcaacagaccccaacatccttggcagaacctgggaaggatgggagccctggatgtgaggtctgtgggagtctgcagatagaaagcattacattgtttaaagaatctactatactttggttggcagcattccatgagctgattttcctgaaacactaaagagaaatgtcttttgtgctacagtttcgtagcatgagtttaaatcaagattatgatgagtaaatgtgtatgggttaaatcaaagataaggttatagtaacatcaaagattaggtgaggtttatagaaagatagatatccaggcttaccaaagtattaagtcaagaatataatatgtgatcagctttcaaagcatttacaagtgctgcaagttagtgaaacagctgtctccgtaaatggaggaaatgtggggaagccttggaatgcccttctggttctggcacattggaaagcacactcagaaggcttcatcaccaagattttgggagagtaaagctaagtatagttgatgtaacattgtagaagcagcataggaacaataagaacaataggtaaagctataattatggcttatatttagaaatgactgcatttgatattttaggatatttttctaggttttttcctttcattttattctcttctagttttgacattttatgatagatttgctctctagaaggaaacgtctttatttaggagggcaaaaattttggtcatagcattcacttttgctattccaatctacaactggaagatacataaaagtgctttgcattgaatttgggataacttcaaaaatcccatggttgttgttagggatagtactaagcatttcagttccaggagaataaaagaaattcctatttgaaatgaattcctcatttggaggaaaaaaagcatgcattctagcacaacaagatgaaattatggaatacaaaagtggctccttcccatgtgcagtccctgtccccccccgccagtcctccacacccaaactgtttctgattggcttttagctttttgttgtttttttttttccttctaacacttgtatttggaggctcttctgtgattttgagaagtatactcttgagtgtttaataaagtttttttccaaaagta

SEQ ID NO: 20 - protein, 4128 aa, Homo sapiens [sequence omitted]

SEQ ID NO: 21 - DNA, 3279 bp, Homo sapiens
  CDS (332)..(3025)
gacgtcgcgcgggctcccgggcggggcgggtccggccgcctccgagcccggccggcagcccccggccttaaagcgcgggctgtccggaggggtcggctttcccaccgaggatttggcactctggtgagggaaaagggcgaaagagaaaagcgagcagccgtcctttcacagcctcagaaagtgctcgcttcccttcgggggctttcgcgaatcccgaggcaatctcggaggcggtatttgacctgtccaaagacgacttgatacctctataatgtaacagaaaaggtcagaaaatattaagcaagtagaagtgtggagcatattaagcaagatgaacatctcgggaagcagctgtggaagccctaactctgcagatacatctagtgactttaaggacctttggacaaaactaaaagaatgtcatgatagagaagtacaaggtttacaagtaaaagtaaccaagctaaaacaggaacgaatcttagatgcacaaagactagaagaattcttcaccaaaaatcaacagctgagggaacagcagaaagtccttcatgaaaccattaaagttttagaagatcggttaagagcaggcttatgtgatcgctgtgcagtaactgaagaacatatgcggaaaaaacagcaagagtttgaaaatatccggcagcagaatcttaaacttattacagaacttatgaatgaaaggaatactctacaggaagaaaataaaaagctttctgaacaactccagcagaaaattgagaatgatcaacagcatcaagcagctgagcttgaatgtgaggaagacgttattccagattcaccgataacagccttctcattttctggcgttaaccggctacgaagaaaggagaacccccatgtccgatacatagaacaaacacatactaaattggagcactctgtgtgtgcaaatgaaatgagaaaagtttccaagtcttcaactcatccacaacataatcctaatgaaaatgaaattctagtagctgacacttatgaccaaagtcaatctccaatggccaaagcacatggaacaagcagctatacccctgataagtcatcttttaatttagctacagttgttgctgaaacacttggacttggtgttcaagaagaatctgaaactcaaggtcccatgagcccccttggtgatgagctctaccactgtctggaaggaaatcacaagaaacagccttttgaggaatctacaagaaatactgaagatagtttaagattttcagattctacttcaaagactcctcctcaagaagaattacctactcgagtgtcatctcctgtatttggagctacctctagtatcaaaagtggtttagatttgaatacaagtttgtccccttctcttttacagcctgggaaaaaaaaacatctgaaaacactcccttttagcaacacttgtatatctagattagaaaaaactagatcaaaatctgaagatagtgcccttttcacacatcacagtcttgggtctgaagtgaacaagatcattatccagtcatctaataaacagatacttataaataaaaatataagtgaatccctaggtgaacagaataggactgagtacggtaaagattctaacactgataaacatttggagcccctgaaatcattgggaggccgaacatccaaaaggaagaaaactgaggaagaaagtgaacatgaagtaagctgcccccaagcttcttttgataaagaaaatgctttcccttttccaatggataatcagttttccatgaatggagactgtgtgatggataaacctctggatctgtctgatcgattttcagctattcagcgtcaagagaaaagccaaggaagtgagacttctaaaaacaaatttaggcaagtgactctttatgaggctttgaagaccattccaaagggcttttcctcaagccgtaaggcctcagatggcaactgcacgttgcccaaagattccccaggggagccctgttcacaggaatgcatcatccttcagcccttgaataaatgctctccagacaataaaccatcattacaaataaaagaagaaaatgctgtctttaaaattcctctacgtccacgtgaaagtttggagactgagaatgttttagatgacataaagagtgctggttctcatgagccaataaaaatacaaaccaggtcagaccatggaggatgtgaacttgcatcagttcttcagttaaatccatgtagaactggtaaaataaagtctctacaaaacaaccaagatgtatcctttgaaaatatccagtggagtatagatccgggagcagacctttctcagtataaaatggatgttactgtaatagatacaaaggatggcagtcagtcaaaattaggaggagagacagtggacatggactgtacattggttagtgaaaccgttctcttaaaaatgaagaagcaagagcagaagggagaaaaaagttcaaatgaagaaagaaaaatgaatgatagcttggaagatatgtttgatcggacaacacatgaagagtatgaatcctgtttggcagacagtttctcccaagcagcagatgaagaggaggaattgtctactgccacaaagaaactacacactcatggtgataaacaagacaaagtcaagcagaaagcgtttgtggagccgtattttaaaggtgatgaaagagagactagcttgcaaaattttcctcatattgaggtggttcggaaaaaagaggagagaagaaaactgcttgggcacacgtgtaaggaatgtgaaatttattatgcagatatgccagcagaagaaagagaaaagaaattggcttcctgctcaagacaccgattccgctacattccacccaacacaccagagaatttttgggaagttggttttccttccactcagacttgtatggaaagaggttatattaaggaagatcttgatccttgtcctcgtccaaaaagacgtcagccttacaacgcaatattttctccaaaaggcaaggagcagaagacatagacgttgaaacagaaacagaaggatgaaggacagttttttccttcttagttatttatagttaaagttggtactaaacattgatttttttgatcttctgtaaatggatttataaatcagttttctattgaaaatgtttgtgatattttgcttttgcacctttaaaacaataaggcgctttcattttgcactctaacttaagagtttttactttatgtagtgatacctaatacaattttgaaaatacaaaaaaaaaa

SEQ ID NO: 22 - protein, 897 aa, Homo sapiens
MNISGSSCGSPNSADTSSDFKDLWTKLKECHDREVQGLQVKVTKLKQERILDAQRLEEFFTKNQQLREQQKVLHETIKVLEDRLRAGLCDRCAVTEEHMRKKQQEFENIRQQNLKLITELMNERNTLQEENKKLSEQLQQKIENDQQHQAAELECEEDVIPDSPITAFSFSGVNRLRRKENPHVRYIEQTHTKLEHSVCANEMRKVSKSSTHPQHNPNENEILVADTYDQSQSPMAKAHGTSSYTPDKSSFNLATVVAETLGLGVQEESETQGPMSPLGDELYHCLEGNHKKQPFEESTRNTEDSLRFSDSTSKTPPQEELPTRVSSPVFGATSSIKSGLDLNTSLSPSLLQPGKKKHLKTLPFSNTCISRLEKTRSKSEDSALFTHHSLGSEVNKIIIQSSNKQILINKNISESLGEQNRTEYGKDSNTDKHLEPLKSLGGRTSKRKKTEEESEHEVSCPQASFDKENAFPFPMDNQFSMNGDCVMDKPLDLSDRFSAIQRQEKSQGSETSKNKFRQVTLYEALKTIPKGFSSSRKASDGNCTLPKDSPGEPCSQECIILQPLNKCSPDNKPSLQIKEENAVFKIPLRPRESLETENVLDDIKSAGSHEPIKIQTRSDHGGCELASVLQLNPCRTGKIKSLQNNQDVSFENIQWSIDPGADLSQYKMDVTVIDTKDGSQSKLGGETVDMDCTLVSETVLLKMKKQEQKGEKSSNEERKMNDSLEDMFDRTTHEEYESCLADSFSQAADEEEELSTATKKLHTHGDKQDKVKQKAFVEPYFKGDERETSLQNFPHIEVVRKKEERRKLLGHTCKECEIYYADMPAEEREKKLASCSRHRFRYIPPNTPENFWEVGFPSTQTCMERGYIKEDLDPCPRPKRRQPYNAIFSPKGKEQKT

SEQ ID NO: 23 - DNA, 3520 bp, Homo sapiens
  CDS (221)..(1495)
aattcccagcaggccttgggcctcagtgcggccgcgaagcagagcgggctgtagagccttgcgcgcgcagtggggatggaacgttgctaggcttagcgggtctggctgctgggggcccgagcagcacgctcggagccgccgcgcgccaaagcgggaatctgggaggcgagcagctctgcagttaatgcacgtattttaaactcccgggcctgcggacgctatgcacaggaagcacctccaggagattccagacctgagtagcaacgttgccaccagcttcacgtggggatgggattccagcaagacttctgaactgctgtcaggcatgggggtctccgccctggagaaagaggagcccgacagtgagaacatcccccaggaactgctctcaaacctgggccacccggagagccccccacggaaacggctgaagagcaaagggagtgacaaagactttgtgattgtccgcaggcctaagctaaatcgagagaactttccaggtgtttcatgggactcccttccggatgagctgctcttgggaatcttttcctgtctgtgcctccctgagctgctaaaggtctctggtgtttgtaagaggtggtatcgcctagcgtctgatgagtctctatggcagaccttagacctcacaggtaaaaatctgcacccggatgtgactggtcggttgctgtctcaaggggtgattgccttccgctgcccacgatcatttatggaccaaccattggctgaacatttcagcccttttcgtgtacagcacatggacctatcgaactcagttatagaagtgtccaccctccacggcatactgtctcagtgttccaagttgcagaatctaagcctggaaggcctgcggctttcggatcccattgtcaatactctcgcaaaaaactcaaatttagtgcgacttaacctttctgggtgttctggattctctgaatttgccctgcagactttgctaagcagctgttccagactggatgagctgaacctctcctggtgttttgatttcactgaaaagcatgtacaggtggctgttgcgcatgtgtcagagaccatcacccagctgaatcttagcggctacagaaagaatctccagaaatcagatctctctactttagttagaagatgccccaatcttgtccatctagacttaagtgatagtgtcatgctaaagaatgactgctttcaggaatttttccagctcaactacctccaacacctatcactcagtcggtgctatgatataatacctgaaactttacttgaacttggagaaattcccacactaaaaacactacaagtttttggaatcgtgccagatggtacccttcaactgttaaaggaagcccttcctcatctacagattaattgctcccatttcaccaccattgccaggccaactattggcaacaaaaagaaccaggagatatggggcatcaaatgccgactgacactgcaaaagcccagttgtctatgaagtatttattgcaggatggtgtctcttctttagaacagggaaaataggcaggaagcccaattgctggagtacttagctagttttattcttggttttccctttgccttcattctgcaagtatactagggagccatttgagagggaaaactatgaaatcttgctttttgaaatgattctaaaagcttctatcactgctttgctcttaagagccaaagttgtaggccttttgaaattttaggagagtgagcctataatttcaagataccttaaagagcaaaatttgagccacctcttccaagtgcccttcttactaagtctattcagaatcaagcttaaaaattaccaccagcaaacaatcttcatagcccatataacttttatctatttaattttatagtattgctttataagacagcttagaagaacaataagctatttgtattatgagctgaacaaaaagagaatcataggatagtagcgtctgaggccatcttttctaggaataggaaagagaaaaatgtatttgaattttgcctttagatttgaaattaggttaatagaaataagtaaccccatgtaattcaccttaaaacttaacaaaagaccaaacattacaaaacccagagatatagaatcaatataggatttgaaggcccagcagacagttttctatgacaggttaatctgaagtatcctgtaatgttcattaagttactgtgtttccagaatctaaattagatgagaaatataattgtggttttctaacttgataatcaaattatgttaacatgggtcctttagcttttaaaatgacttgctttgttttagaaaggtggtattaatccactctctattcttgaaaatttggatgggagaattctgaagttgcctgctgttttcctttagcgctgaggttcttaaggttacttttatattactctggaatcaagtattttaaattgtattttttttttaaatgatctctcagcaataattgtttgaaactatccatatataaggttatcagacctacagttccctaagaggaactgcatgttctcttcaatcagaaatatacagtagaagcaggtatatcttccatgcagtttcagtagtaagcactacttatacctacataagagttaaaatccagatgtgggaccttttgataccatcagtgatatatatttttttaaactggtacagagaagtgaaaagattaaattctacttctattttttttttttttttttgagacggagtctcgctctgtcaccaaggccggagtgcagtggtgcgatctcggctcactgcaagctccgcctcccaggttcacgtcattctcctgcctcagcctcccgactagctgggactacaggcgcccaccaccacgcccggctaatttttttgtatttttagtagagacggggtttcaccatgttagccaggatggtctcaatctcctgacctcatgatccgcccgtcttggcctcccaaagtgctgggattacaggcatgagcaactgcgcccagccaaattctacttcttaaaaatcacaaaaactagtttaaattgatgacttgttcgtatgttcaaaatgtaacaacaaaaaaagctaacaccagtcatttatattaactttttttttttaaatcaaaaattgttaatgttagaaacatactatgaagtgcctttatctgcttagacctaaggaagattttaaagttgggttgcacaggaaatgatgatgcttcaatttcttaatagttaaaaagtgctaaatactacttgaaattattgtttacagattagtgacaagagctggggttaggatccggttggactctgacatcggatgccctcaaacatacagaacttccaaactcaagtccagccataagctattttgccaacatgtcagagtaatctgtatttttgtatgtgatttctacttttatagacttgttttaaaacaataaaacacatttttataaaaatgagtgcttaaaaaaaaaaaaaaaaaa

SEQ ID NO: 24 - protein, 424 aa, Homo sapiens
MHRKHLQEIPDLSSNVATSFTWGWDSSKTSELLSGMGVSALEKEEPDSENIPQELLSNLGHPESPPRKRLKSKGSDKDFVIVRRPKLNRENFPGVSWDSLPDELLLGIFSCLCLPELLKVSGVCKRWYRLASDESLWQTLDLTGKNLHPDVTGRLLSQGVIAFRCPRSFMDQPLAEHFSPFRVQHMDLSNSVIEVSTLHGILSQCSKLQNLSLEGLRLSDPIVNTLAKNSNLVRLNLSGCSGFSEFALQTLLSSCSRLDELNLSWCFDFTEKHVQVAVAHVSETITQLNLSGYRKNLQKSDLSTLVRRCPNLVHLDLSDSVMLKNDCFQEFFQLNYLQHLSLSRCYDIIPETLLELGEIPTLKTLQVFGIVPDGTLQLLKEALPHLQINCSHFTTIARPTIGNKKNQEIWGIKCRLTLQKPSCL

SEQ ID NO: 25 - DNA, 4562 bp, Homo sapiens
  CDS (129)..(2756)
ggttggaattttggcgggttcagctgtgaacgaagaaggcgtcccggcatcggccaagattctacattgctcatctgggcatctgagcctccttcgaagtttcctgtcacaactgtcctcttgacagcatggatgaggaggaagacaatctgtctctgctgaccgcactgctggaagaaaatgagtcagccttggattgtaattcagaagaaaataacttcttgacgcgggaaaatggcgagcccgacgcatttgatgagctctttgatgccgacggcgacggtgaatcttatacagaagaggctgatgatggagaaacaggagagacaagagacgaaaaggaaaatctggccactctctttggagatatggaggacttaacagatgaagaagaagttcccgcatcacagtcaactgaaaatagggtcctccctgctcctgcccccaggcgagagaaaacgaatgaagagttgcaagaggaattaaggaatttgcaagagcaaatgaaggccttacaagagcagctaaaagtaacaacaattaaacagacagcaagcccagcccgtctgcaaaaatcccctgtagagaagtctccccggccacctcttaaggagaggagagttcagagaattcaggagtcaacatgcttttctgcggagcttgatgtccctgcgctaccaagaaccaagagggtggctcgaacaccaaaggcttcacctccagatcccaaaagctcatcttcaaggatgacaagtgcaccctcccaacccctacagacgatttctcggaacaaacctagtgggataactagaggtcaaattgtggggaccccaggaagttctggggaaacgactcaacccatctgtgtggaagccttctctggtctgcggctcaggcggcctcgagtatcctccacagaaatgaacaagaaaatgaccggccgaaaactgatcagactgtctcagatcaaggaaaagatggccagagagaagctggaagaaatagattgggtgacatttggggttatattgaagaaggttacgccacagagtgtgaatagtggaaaaaccttcagcatatggaaactgaatgatcttcgtgacctgacacaatgtgtgtccttgttcttatttggagaagttcacaaagcgctctggaagacggagcaggggactgtcgtagggatcctcaatgccaaccccatgaagcccaaggatggttcagaggaggtgtgtttatctatcgatcatcctcagaaggtcttaattatgggtgaagctcttgacctgggaacctgtaaagccaagaagaagaatggagagccgtgcacgcagactgtgaatttgcgtgactgtgagtactgtcagtaccatgtccaggctcagtacaagaagctcagcgcaaagcgtgcggatctgcagtccaccttctctggaggacgaattccaaagaagtttgcccgcagaggcaccagcctcaaagaacggctgtgccaagatggcttttactacggaggggtttcttctgcctcgtatgcagcttcaattgcagcagctgtggctcctaagaagaagattcaaaccactctgagtaatctggttgttaagggcacaaacttgatcatccaggaaacacggcaaaaactcggaataccccagaagagcctgtcttgctctgaggagttcaaggaactgatggacctgccgacgtgtggagccaggaacttaaaacaacatttagccaaagccacagcttcagggattatggggagcccaaaaccagccatcaagtccatctcggcctcagcactcttgaagcaacagaagcagcggatgttggagatgaggagaaggaaatcagaagaaatacagaagcgatttctgcagagctcaagtgaagttgagagcccagctgtgccatcttcatcaagacagccccctgctcagcctccacggacaggatccgagttccccaggctggagggagccccggccacaatgacgcccaagctggggcgaggtgtcttggaaggagatgatgttctcttttatgatgagtcaccaccaccaagaccaaaactgagtgctttagcagaagccaaaaagttagctgctatcaccaaattaagggcaaaaggccaggttcttacaaaaacaaacccaaacagcattaagaagaaacaaaaggaccctcaggacatcctggaggtgaaggaacgtgtagaaaaaaacaccatgttttcttctcaagctgaggatgaattggagcctgccaggaaaaaaaggagagaacaacttgcctatctggaatctgaggaatttcagaaaatcctaaaagcaaaatcaaaacacacaggcatcctgaaagaggccgaggctgagatgcaggagcgctactttgagccactggtgaaaaaagaacaaatggaagaaaagatgagaaacatcagagaagtgaagtgccgtgtcgtgacatgcaagacgtgcgcctatacccacttcaagctgctggagacctgcgtcagtgagcagcatgaataccactggcatgatggtgtgaagaggtttttcaaatgtccctgtggaaacagaagcatctccttggacagactcccgaacaagcactgcagtaactgtggcctctacaaatgggaacgggacggaatgctaaaggaaaagactggtccaaagataggaggagaaactctgttaccaagaggagaagaacatgctaaatttctgaacagccttaaataacccgaacttcagacattttcccacagacttcctggcctcctgtgactctggaaagcaaaggattggctgtgtattgtccattgattcctgattgacgccgtcaaaaacaaatgcttgttaagcccataagctttgcctgcttactttctgccattgggttggtttgataccacatttaacattgacatttaagtggaaaaccaagttatcattgtcttttctaagctcagtgtggatgattgcattacttcattcactgaagtttttgcccaaaaattggaaggtaaacagagagctatgtttctgtatcttttggttatagagtgttcacttctttatcataacaaaattctagtgtttatacgaacacccagaggcaaaagaatttggcttaattctcactccaggtaagtagcttaacttctgggcttcagttttctcatctgtaaaatcaggaagattggactaagtgatcctgaaatgtattttttagcactggatttctacaaataataaaactttcccatctagataatgatgatcacatagtcttgatgtacggacattaaaagccagatttcttcattcaattctgttatctctgttttactctttgaaattgatcaagccactgaatcactttgcatttcagtttatatatatagagagaaagaaggtgtctgctcttacattattgtggagccctgtgatagaaatatgtaaaatctcatattattttttttttaatttttttattttttatgacagggtctcactatgtcaccctggctggagtgcagtagtgcgatcgcggcacactgcagccttggcttccctgggctcaagcagtcctcccacctcagtctcccaaatagctaggactacaggcgtgcgtgaccaagcccagctaatttttgcattttttgtagagatggggttttgccatgttgctcaggctggtctcaaactcctgagcactagcaatccacccacctctgtttccaaaaaaaaaaaaaaaatgaaaggtcaacccctatgcaaattaccacagcaaaggtttcattcaggagattcttccatctgggcaacctggttttccaaatatcatttgacctaagtgaatgttgatactagctaaagattgggtaaattggttgaattattgtattgaagcttgagctgtagctaaaagtaatttaggtttcccctaagatgttattatgttagggacataacacttttgggaggttgttgtgggagatggttgatttaggttttcaaaagctagaaataaaatttacatgccttagatttcataaaattctgctctaattgggtggaaggtgctgtatctaacttgtgttcctcctaaggttatgtcctaataactattcttttaggagtatacttctactttatagaaggttgcttttctttttaattttttctaacaaagaaaagaataaagtatttattaataagaaccagaaagcacttgaaactgatgtttttaatggctcatttagggtagatttatttatctcattaacttaaaacagctatgtgtatgaaataggtcacaacagaacttgaacaccaggttggtgtctgagcaatccctttcttatgggaaaaacaatgttcttgtttgaacagagggtatcattgcagtcagtattcacgtgtatattgttatataagttgtataatatgcttgtaaaggctgagggtgagctgtatctggatgcctttttacaatttgattttaacttttaaaataaatttaaaacataaaaaaaaaaaaaa

SEQ ID NO: 26 - protein, 875 aa, Homo sapiens
MDEEEDNLSLLTALLEENESALDCNSEENNFLTRENGEPDAFDELFDADGDGESYTEEADDGETGETRDEKENLATLFGDMEDLTDEEEVPASQSTENRVLPAPAPRREKTNEELQEELRNLQEQMKALQEQLKVTTIKQTASPARLQKSPVEKSPRPPLKERRVQRIQESTCFSAELDVPALPRTKRVARTPKASPPDPKSSSSRMTSAPSQPLQTISRNKPSGITRGQIVGTPGSSGETTQPICVEAFSGLRLRRPRVSSTEMNKKMTGRKLIRLSQIKEKMAREKLEEIDWVTFGVILKKVTPQSVNSGKTFSIWKLNDLRDLTQCVSLFLFGEVHKALWKTEQGTVVGILNANPMKPKDGSEEVCLSIDHPQKVLIMGEALDLGTCKAKKKNGEPCTQTVNLRDCEYCQYHVQAQYKKLSAKRADLQSTFSGGRIPKKFARRGTSLKERLCQDGFYYGGVSSASYAASIAAAVAPKKKIQTTLSNLVVKGTNLIIQETRQKLGIPQKSLSCSEEFKELMDLPTCGARNLKQHLAKATASGIMGSPKPAIKSISASALLKQQKQRMLEMRRRKSEEIQKRFLQSSSEVESPAVPSSSRQPPAQPPRTGSEFPRLEGAPATMTPKLGRGVLEGDDVLFYDESPPPRPKLSALAEAKKLAAITKLRAKGQVLTKTNPNSIKKKQKDPQDILEVKERVEKNTMFSSQAEDELEPARKKRREQLAYLESEEFQKILKAKSKHTGILKEAEAEMQERYFEPLVKKEQMEEKMRNIREVKCRVVTCKTCAYTHFKLLETCVSEQHEYHWHDGVKRFFKCPCGNRSISLDRLPNKHCSNCGLYKWERDGMLKEKTGPKIGGETLLPRGEEHAKFLNSLK

SEQ ID NO: 27 - DNA, 1405 bp, Homo sapiens
  CDS (88)..(831)
tttcccggcgtccatttagtggcgggaaaagcgaccttttctgagcgcgtttgcctgttgagtggtagcctttcccctcaaccagcaatggaggagcagccccagatgcaagacgccgacgagcccgcggactccggaggggaaggccgggcaggcgggccaccgcaggtcgccggcgcccaggcggcgtgcagcgaggaccgcatgaccctgctcctcaggctgagagcacagacaaaacaacaactcttagaatataaatcaatggttgatgcaagtgaagaaaaaactccagaacaaattatgcaagaaaagcaaatcgaagctaaaattgaagacctggaaaatgaaattgaagaggtaaaagttgcttttgagataaaaaagcttgcattagacaggatgagactttcaactgcacttaaaaaaaacctggagaaaattagcagacagtctagtgtgctcatggataacatgaaacacctattagagctaaataaattaataatgaaatcacagcaggaatcttgggatttagaggaaaaactgcttgatattagaaagaagagattgcaattaaaacaagcttcagaaagtaagcttttagaaatacagactgaaaagaacaaacagaagattgatttggacagtatggaaaactcagagaggataaagatcatacgacaaaacctacagatggagataaaaattactactgttattcaacatgtgttccagaaccttattttggggagtaaagtcaattgggcagaggatcctgcccttaaggaaattgttctgcagcttgagaagaatgttgacatgatgtaataagaattcatttctgacatattttacatttctggcaatctcaactcttatttggaatacttctgtgcatttgtctgtccaccgtaattttagaaaagcatatccataacgtttacagttgtagtacagttgtggttagttatttgtagtgggattgaaagtaatttttttctttttatatttctatatttagtttgtttttttgttgttgttgttttttgagatggagtctcgctttgttgcccagactggagggcagtggcgcgatctcggctcactgcaacctctgcctcccgggttcaagcagttctgcctcagcctcccaagtagctgtgactaaaggtgcacgccgccatgcccagctaattttttgtattttagtagagacggggtttcaccgtgttgcccaggctgctctcagaactcctgagctcaggcagtccaccgcctcggcctaccgaagtgctaggattacagacgtaagccaccgagcctggtctagtttgcattttttttctatcagttttataagttaagaaataaaaggaattaatgttaaaaaaaaaaaaaaaaa

SEQ ID NO: 28 - protein, 247 aa, Homo sapiens
MEEQPQMQDADEPADSGGEGRAGGPPQVAGAQAACSEDRMTLLLRLRAQTKQQLLEYKSMVDASEEKTPEQIMQEKQIEAKIEDLENEIEEVKVAFEIKKLALDRMRLSTALKKNLEKISRQSSVLMDNMKHLLELNKLIMKSQQESWDLEEKLLDIRKKRLQLKQASESKLLEIQTEKNKQKIDLDSMENSERIKIIRQNLQMEIKITTVIQHVFQNLILGSKVNWAEDPALKEIVLQLEKNVDMM

SEQ ID NO: 29 - DNA, 3109 bp, Homo sapiens
  CDS (278)..(2614)
gggggccggccagaaacgggctggggagggggggccccgcagcccccctgggccatgctgactcccggggcctgacccccccgggccagccccccctcccccagctccgcggcccgccgactggggggggccagcccagccccctggggacccccggagaggtggggggcagccgggggggccgggacggagcggtcgccggcccccaccggagagacggggcgacggccgcagggggggcggccgggggaccggtcgggccgggaccaagggcaccatgtcgtccggggccaaggagggaggtgggggctctcccgcctaccacctcccccacccccacccccacccaccccagcacgcccaatatgtgggcccctatcggctggagaagacgctgggcaaaggacagacagggctggttaaactcggggtccactgcatcacgggtcagaaggtcgccatcaagatcgtgaaccgggagaagctgtcggagtcggtgctgatgaaggtggagcgggagatcgccatcctgaagctcatcgaacacccacatgtcctcaagctccacgacgtctacgagaacaagaaatatttgtacctggttctggagcacgtctcggggggtgagctattcgactacctggtaaagaaggggagactgacgcccaaggaggcccgaaagttcttccgccagattgtgtctgcgctggacttctgccacagctactccatctgccacagagacctaaagcccgagaacctgcttttggatgagaaaaacaacatccgcattgcagacttcggcatggcgtccctgcaggtgggggacagcctcctggagaccagctgcgggtccccccattatgcgtgtccagaggtgattaagggggaaaaatatgatggccgccgggcagacatgtggagctgtggagtcatcctcttcgccctgctcgtgggggctctgccctttgatgacgacaacctccgccagctgctggagaaggtgaaacggggcgtcttccacatgccccacttcattcctccagattgccagagcctcctgaggggaatgatcgaagtggagcccgaaaaaaggctcagtctggagcaaattcagaaacatccttggtacctaggcgggaaacacgagccagacccgtgcctggagccagcccctggccgccgggtagccatgcggagcctgccatccaacggagagctggaccccgacgtcctagagagcatggcatcactgggctgcttcagggaccgcgagaggctgcatcgcgagctgcgcagtgaggaggagaaccaagaaaagatgatatattatctgcttttggatcggaaggagcggtatcccagctgtgaggaccaggacctgcctccccggaatgatgttgaccccccccggaagcgtgtggattctcccatgctgagccgtcacgggaagcggcgaccagagcggaagtccatggaagtcctgagcatcaccgatgccgggggtggtggctcccctgtacccacccgacgggccttggagatggcccagcacagccagagatcccgtagcgtcagtggagcctccacgggtctgtcctccagccctctaagcagcccaaggagtccggtcttttccttttcaccggagccgggggctggagatgaggctcgaggcgggggctccccgacttccaaaacgcagacgctgccttctcggggccccaggggtgggggcgccggggagcagcccccgccccccagtgcccgctccacacccctgcccggccccccaggctccccgcgctcctctggcgggacccccttgcactcgcctctgcacacgccccgggccagtcccaccgggaccccggggacaacaccaccccccagccccggcggtggcgtcgggggagccgcctggaggagtcgtctcaactccatccgcaacagcttcctgggctcccctcgctttcaccggcgcaagatgcaggtccctaccgctgaggagatgtccagcttgacgccagagtcctccccggagctggcaaaacgctcctggttcgggaacttcatctccttggacaaagaagaacaaatattcctcgtgctaaaggacaaacctctcagcagcatcaaagcagacatcgtccatgcctttctgtcgatccccagcctgagtcacagtgtgctgtcacagaccagcttcagggccgagtacaaggccagtggcggcccctccgtcttccaaaagcccgtccgcttccaggtggacatcagctcctctgagggtccagagccctccccgcgacgggacggcagcggaggtggtggcatctactccgtcaccttcactctcatctcgggtcccagccgtcggttcaagcgagtggtggagaccatccaggcacagctcctgagcactcatgaccagccctccgtgcaggccctggcagacgagaagaacggggcccagacccggcctgctggtgccccaccccgaagcctgcagcccccacccggccgcccagacccagagctgagcagctctccccgccgaggcccccccaaggacaagaagctcctggccaccaacgggacccctctgccctgaccccacggggccggggagggaggggacccccctccaccccccttccgtgccccccaactgtgaatctgtaaataaggcccaaggaacatgtcgggaggggggtggacacaaaaaccggccttgccctgcagggatggggctccacaggccgtgcccaactgggggtggttctaggggaacagggggcgggggagctgtttctattttatttattgattaatttattattttatttattgatcaatctctctgcggggtggggtgggggagggacgggagctggttggggtggcttagcagatccggacagggccctctgtccctgtgtcgtccccaaccccctcttcccgggcccctcctcccctggtcctccccccacgaccttctgtacggatttgctctccggaaggaattctggtttcgcgtgatcctgcctgcgtccgtgtctctgattccgccggcggcaaaaaaaaaaaaaaaaaaaaaaaaaaaaaa

SEQ ID NO: 30 - protein, 778 aa, Homo sapiens
MSSGAKEGGGGSPAYHLPHPHPHPPQHAQYVGPYRLEKTLGKGQTGLVKLGVHCITGQKVAIKIVNREKLSESVLMKVEREIAILKLIEHPHVLKLHDVYENKKYLYLVLEHVSGGELFDYLVKKGRLTPKEARKFFRQIVSALDFCHSYSICHRDLKPENLLLDEKNNIRIADFGMASLQVGDSLLETSCGSPHYACPEVIKGEKYDGRRADMWSCGVILFALLVGALPFDDDNLRQLLEKVKRGVFHMPHFIPPDCQSLLRGMIEVEPEKRLSLEQIQKHPWYLGGKHEPDPCLEPAPGRRVAMRSLPSNGELDPDVLESMASLGCFRDRERLHRELRSEEENQEKMIYYLLLDRKERYPSCEDQDLPPRNDVDPPRKRVDSPMLSRHGKRRPERKSMEVLSITDAGGGGSPVPTRRALEMAQHSQRSRSVSGASTGLSSSPLSSPRSPVFSFSPEPGAGDEARGGGSPTSKTQTLPSRGPRGGGAGEQPPPPSARSTPLPGPPGSPRSSGGTPLHSPLHTPRASPTGTPGTTPPPSPGGGVGGAAWRSRLNSIRNSFLGSPRFHRRKMQVPTAEEMSSLTPESSPELAKRSWFGNFISLDKEEQIFLVLKDKPLSSIKADIVHAFLSIPSLSHSVLSQTSFRAEYKASGGPSVFQKPVRFQVDISSSEGPEPSPRRDGSGGGGIYSVTFTLISGPSRRFKRVVETIQAQLLSTHDQPSVQALADEKNGAQTRPAGAPPRSLQPPPGRPDPELSSSPRRGPPKDKKLLATNGTPLP

SEQ ID NO: 31 - DNA, 21 bp, Artificial
  Synthesize RNA
  misc_RNA (1)..(19)
gggaggcaagaccuucauutt

SEQ ID NO: 32 - DNA, 21 bp, Artificial
  Synthesize RNA
  misc_RNA (1)..(19)
aaugaaggucuugccuccctg

SEQ ID NO: 33 - DNA, 21 bp, Artificial
  Synthesize RNA
  misc_RNA (1)..(19)
uccuaagagugcugggcautt

SEQ ID NO: 34 - DNA, 21 bp, Artificial
  Synthesize RNA
  misc_RNA (1)..(19)
augcccagcacucuuaggatt

SEQ ID NO: 35 - DNA, 21 bp, Artificial
  Synthesize RNA
  misc_RNA (1)..(19)
acgugacacguucggagaatt

SEQ ID NO: 36 - DNA, 21 bp, Artificial
  Synthesize RNA
  misc_RNA (1)..(19)
uucuccgaacgugucacgutt

SEQ ID NO: 37 - DNA, 21 bp, Artificial
  Synthesize RNA
  misc_RNA (1)..(19)
ucucccucaucuacaccaatt

SEQ ID NO: 38 - DNA, 21 bp, Artificial
  Synthesize RNA
  misc_RNA (1)..(19)
uugguguagaugagggagatg

SEQ ID NO: 39 - DNA, 2172 bp, Homo sapiens
  CDS (252)..(1934)
aatcccttcaaccttctgcgcgcttccgccttcatgctagcaacgcccgcagtgacgcgcaggccccgccccctcccgcgcgcctcccggaagtggccggtccagagctgtggggtggcctccgcgcggtctctggcggagtcggggaatcggatcaaggcgagaggatccggcagggaaggagcttcggggccgggggttgggccgcacatttacgtgcgcgaagcggagtggaccgggagctggtgacgatggcggggccgcagcccctggcgctgcaactggaacagttgttgaacccgcgaccaagcgaggcggaccctgaagcggaccccgaggaagccactgctgccagggtgattgacaggtttgatgaaggggaagatggggaaggtgatttcctagtagtgggtagcattagaaaactggcatcagcctccctcttggacacggacaaaaggtattgcggcaaaaccacctctagaaaagcatggaatgaagaccattgggagcagactctgccaggatcgtctgatgaggaaatatctgatgaggaagggtctggagatgaagattcagagggactgggtctggaggaatatgatgaggacgacctgggtgctgctgaggaacaggagtgtggtgatcacagggagagcaagaagagcagaagccactctgcaaaaacaccgggcttcagtgtccagagtatcagtgactttgagaaatttaccaagggaatggatgaccttgggagcagtgaggaggaggaagacgaagagagtggcatggaagaaggggatgacgcggaagactcccaaggcgagagtgaggaagacagggctggagatagaaacagtgaggatgatggtgtggtgatgaccttctctagtgtcaaagtttctgaggaagtggagaaaggaagagccgtgaagaaccagatagcactgtgggaccagctcttggaaggaaggatcaaactacaaaaagctctgttgaccaccaaccagcttcctcaaccagatgttttcccattgttcaaggacaaaggtggcccagaattttccagtgccctgaaaaatagtcacaaggcacttaaagcattgttgaggtcattggtaggtcttcaggaagagttgcttttccagtacccagacactagatatctagtagatgggacaaagcccaatgcgggaagtgaggagatttctagtgaagatgatgagctggtagaagagaagaagcagcaacgaagaagggtccctgcaaagaggaagctggagatggaggactatcccagcttcatggcaaagcgctttgccgactttacagtctacaggaaccgcacacttcagaaatggcacgataagaccaaactggcttctggaaaactggggaagggttttggtgcctttgaacgctcaatcttgactcagatcgaccatattctgatggacaaagagagattacttcgaaggacacagaccaagcgctctgtctatcgagttcttggcaaacctgagccagcagctcagcctgtcccagagagtttgccaggggaaccggagatccttcctcaagcccctgctaatgctcatctgaaggacttggatgaagaaatctttgatgatgatgacttttaccaccagctccttcgagaactcatagaacggaagaccagctccttggatcccaacgatcaggtggccatgggaaggcagtggcttgcaatccagaagttacgaagcaaaatccacaaaaaagtagataggaaagccagcaaaggcaggaaacttcggtttcatgtccttagcaagctactgagtttcatggcacctattgaccatactacaatgaatgatgatgccaggacagaactgtaccgctctctttttggccagctccaccctcccgacgaaggccacggggattgacatcgcccacctccgacacccagtgggcgccttggctggtgcggctgctggtccagatggaggaaaccagtgactttatggggctgagctagtagggaagcccctggaaagatgctgcgttccgaacctgtgcctaatacacgcaagggcgctgtcccgcccaaccccgcctttaaacgccacaaataaagagcattgttaccgccaaaaaaaaaaaaaaaaaaaaaaaaaaaaaaaa

SEQ ID NO: 40 - protein, 560 aa, Homo sapiens
MAGPQPLALQLEQLLNPRPSEADPEADPEEATAARVIDRFDEGEDGEGDFLVVGSIRKLASASLLDTDKRYCGKTTSRKAWNEDHWEQTLPGSSDEEISDEEGSGDEDSEGLGLEEYDEDDLGAAEEQECGDHRESKKSRSHSAKTPGFSVQSISDFEKFTKGMDDLGSSEEEEDEESGMEEGDDAEDSQGESEEDRAGDRNSEDDGVVMTFSSVKVSEEVEKGRAVKNQIALWDQLLEGRIKLQKALLTTNQLPQPDVFPLFKDKGGPEFSSALKNSHKALKALLRSLVGLQEELLFQYPDTRYLVDGTKPNAGSEEISSEDDELVEEKKQQRRRVPAKRKLEMEDYPSFMAKRFADFTVYRNRTLQKWHDKTKLASGKLGKGFGAFERSILTQIDHILMDKERLLRRTQTKRSVYRVLGKPEPAAQPVPESLPGEPEILPQAPANAHLKDLDEEIFDDDDFYHQLLRELIERKTSSLDPNDQVAMGRQWLAIQKLRSKIHKKVDRKASKGRKLRFHVLSKLLSFMAPIDHTTMNDDARTELYRSLFGQLHPPDEGHGD

SEQ ID NO: 41 - DNA, 3008 bp, Homo sapiens
  CDS (555)..(1997)
taattatgggtctgtaaccaccctggactgggtgctcctcactgacggacttgtctgaacctctctttgtctccagcgcccagcactgggcctggcaaaacctgagacgcccggtacatgttggccaaatgaatgaaccagattcagaccggcaggggcgctgtggtttaggaggggcctggggtttctcccaggaggtttttgggcttgcgctggagggctctggactcccgtttgcgccagtggcctgcatcctggtcctgtcttcctcatgtttgaatttctttgctttcctagtctggggagcagggaggagccctgtgccctgtcccaggatccatgggtaggaacaccatggacagggagagcaaacggggccatctgtcaccaggggcttagggaaggccgagccagcctgggtcaaagaagtcaaaggggctgcctggaggaggcagcctgtcagctggtgcatcagaggctgtggccaggccagctgggctcggggagcgccagcctgagaggagcgcgtgagcgtcgcgggagcctcgggcaccatgagcgacgtggctattgtgaaggagggttggctgcacaaacgaggggagtacatcaagacctggcggccacgctacttcctcctcaagaatgatggcaccttcattggctacaaggagcggccgcaggatgtggaccaacgtgaggctcccctcaacaacttctctgtggcgcagtgccagctgatgaagacggagcggccccggcccaacaccttcatcatccgctgcctgcagtggaccactgtcatcgaacgcaccttccatgtggagactcctgaggagcgggaggagtggacaaccgccatccagactgtggctgacggcctcaagaagcaggaggaggaggagatggacttccggtcgggctcacccagtgacaactcaggggctgaagagatggaggtgtccctggccaagcccaagcaccgcgtgaccatgaacgagtttgagtacctgaagctgctgggcaagggcactttcggcaaggtgatcctggtgaaggagaaggccacaggccgctactacgccatgaagatcctcaagaaggaagtcatcgtggccaaggacgaggtggcccacacactcaccgagaaccgcgtcctgcagaactccaggcaccccttcctcacagccctgaagtactctttccagacccacgaccgcctctgctttgtcatggagtacgccaacgggggcgagctgttcttccacctgtcccgggagcgtgtgttctccgaggaccgggcccgcttctatggcgctgagattgtgtcagccctggactacctgcactcggagaagaacgtggtgtaccgggacctcaagctggagaacctcatgctggacaaggacgggcacattaagatcacagacttcgggctgtgcaaggaggggatcaaggacggtgccaccatgaagaccttttgcggcacacctgagtacctggcccccgaggtgctggaggacaatgactacggccgtgcagtggactggtgggggctgggcgtggtcatgtacgagatgatgtgcggtcgcctgcccttctacaaccaggaccatgagaagctttttgagctcatcctcatggaggagatccgcttcccgcgcacgcttggtcccgaggccaagtccttgctttcagggctgctcaagaaggaccccaagcagaggcttggcgggggctccgaggacgccaaggagatcatgcagcatcgcttctttgccggtatcgtgtggcagcacgtgtacgagaagaagctcagcccacccttcaagccccaggtcacgtcggagactgacaccaggtattttgatgaggagttcacggcccagatgatcaccatcacaccacctgaccaagatgacagcatggagtgtgtggacagcgagcgcaggccccacttcccccagttctcctactcggccagcggcacggcctgaggcggcggtggactgcgctggacgatagcttggagggatggagaggcggcctcgtgccatgatctgtatttaatggtttttatttctcgggtgcatttgagagaagccacgctgtcctctcgagcccagatggaaagacgtttttgtgctgtgggcagcaccctcccccgcagcggggtagggaagaaaactatcctgcgggttttaatttatttcatccagtttgttctccgggtgtggcctcagccctcagaacaatccgattcacgtagggaaatgttaaggacttctgcagctatgcgcaatgtggcattggggggccgggcaggtcctgcccatgtgtcccctcactctgtcagccagccgccctgggctgtctgtcaccagctatctgtcatctctctggggccctgggcctcagttcaacctggtggcaccagatgcaacctcactatggtatgctggccagcaccctctcctgggggtggcaggcacacagcagccccccagcactaaggccgtgtctctgaggacgtcatcggaggctgggcccctgggatgggaccagggatgggggatgggccagggtttacccagtgggacagaggagcaaggtttaaatttgttattgtgtattatgttgttcaaatgcattttgggggtttttaatctttgtgacaggaaagccctcccccttccccttctgtgtcacagttcttggtgactgtcccaccgggagcctccccctcagatgatctctccacggtagcacttgaccttttcgacgcttaacctttccgctgtcgccccaggccctccctgactccctgtgggggtggccatccctgggcccctccacgcctcctggccagacgctgccgctgccgctgcaccacggcgtttttttacaacattcaactttagtatttttactattataatataatatggaaccttccctccaaattcttcaataaaagttgcttttcaaaaaaaaaaaaaaaaaaaaaa

SEQ ID NO: 42 - protein, 480 aa, Homo sapiens [sequence omitted]

SEQ ID NO: 43 - DNA, 2358 bp, Homo sapiens
  CDS (54)..(2045)
cccgggaatcgcacaggacccggctcccctcgcctaagctgctggggggcgccatgggccgctaccgcatccgcgtggccaccggggcctggctcttctccgggtcgtacaaccgcgtgcagctttggctggtcgggacgcgcggggaggcggagctggagctgcagctgcggcccgcgcggggcgaggaggaggagtttgatcatgacgttgcagaggacttggggctcctgcagttcgtgaggctgcgcaagcaccactggctggtggacgacgcgtggttctgcgaccgcatcacggtgcagggccctggagcctgcgcggaggtggccttcccgtgctaccgctgggtgcagggcgaggacatcctgagcctgcccgagggcaccgcccgcctgccaggagacaatgctttggacatgttccagaagcatcgagagaaggaactgaaagacagacagcagatctactgctgggccacctggaaggaagggttacccctgaccatcgctgcagaccgtaaggatgatctacctccaaatatgagattccatgaggagaagaggctggactttgaatggacactgaaggcaggggctctggagatggccctcaaacgtgtttacaccctcctgagctcctggaactgcctagaagactttgatcagatcttctggggccagaagagtgccctggctgagaaggttcgccagtgctggcaggatgatgagttgttcagctaccagttcctcaatggtgccaaccccatgctgttgagacgctcgacctctctgccctccaggctagtgctgccctcggggatggaagagcttcaggctcaactggagaaagaacttcagaatggttccctgtttgaagctgacttcatccttctggatggaattccagccaacgtgatccgaggagagaagcaatacctggctgcccccctcgttatgctgaagatggagcccaatgggaagctgcagcccatggtcatccagattcagcctcccaaccccagctctccaaccccaacactgttcctgccctcagaccccccacttgcctggctcctggcaaagtcctgggtccgaaattcagatttccaactgcacgagatccagtatcacttgctgaacactcacctggtggctgaggtcatcgctgtcgccaccatgcggtgcctcccaggactgcaccccatcttcaagttcctgatcccccatatccgctacaccatggaaatcaacacccgggcccggacccaactcatctcagatggaggaatttttgataaggcagtgagcacaggtggagggggccatgtacagttgctccgtcgggcggcagctcagctgacctactgctccctctgtcctcctgacgacctggctgaccggggcctgctgggactcccaggtgctctctatgcccatgatgctttacggctctgggagatcattgccaggtatgtggaggggatcgtccacctcttctaccaaagggatgacatagtgaagggggaccctgagctgcaggcctggtgtcgggagatcacggaggtggggctgtgccaggcccaggaccgaggtttccctgtctccttccagtcccagagtcaactctgccatttcctcaccatgtgcgtcttcacgtgcactgcccagcatgccgccatcaaccagggccagctggactggtatgcctgggtccctaatgctccatgcacaatgcggatgcccccacccaccaccaaggaagatgtgacgatggccacagtgatggggtcactacctgatgtccggcaggcctgtcttcaaatggccatctcatggcatctgagtcgccgccagccagacatggtgcctctggggcaccacaaagaaaaatatttctcaggccccaagcccaaagctgtgctaaaccaattccgaacagatttggaaaagctggaaaaggagattacagcccggaatgagcaacttgactggccctatgaatatctgaagcccagctgcatagagaacagtgtcaccatctgagccctagagtgactctacctgcaagatttcacatcagctttaggactgacatttctatcttgaatttcatgctttcctaaagtctctgctgctaaggctctatttcctcccccagttaaaccccctacattagtatcccactagcccaggggagcagtaaactttctctgcaaagactagatccttttttacgctttgcagaccgcatagtcactgtctcaactactcagctctcctgctgcagcatgaaggcagccacagacaacatggaaatgagtgtgactatgttccaataaaactttatggacactga

SEQ ID NO: 44 - protein, 663 aa, Homo sapiens
MGRYRIRVATGAWLFSGSYNRVQLWLVGTRGEAELELQLRPARGEEEEFDHDVAEDLGLLQFVRLRKHHWLVDDAWFCDRITVQGPGACAEVAFPCYRWVQGEDILSLPEGTARLPGDNALDMFQKHREKELKDRQQIYCWATWKEGLPLTIAADRKDDLPPNMRFHEEKRLDFEWTLKAGALEMALKRVYTLLSSWNCLEDFDQIFWGQKSALAEKVRQCWQDDELFSYQFLNGANPMLLRRSTSLPSRLVLPSGMEELQAQLEKELQNGSLFEADFILLDGIPANVIRGEKQYLAAPLVMLKMEPNGKLQPMVIQIQPPNPSSPTPTLFLPSDPPLAWLLAKSWVRNSDFQLHEIQYHLLNTHLVAEVIAVATMRCLPGLHPIFKFLIPHIRYTMEINTRARTQLISDGGIFDKAVSTGGGGHVQLLRRAAAQLTYCSLCPPDDLADRGLLGLPGALYAHDALRLWEIIARYVEGIVHLFYQRDDIVKGDPELQAWCREITEVGLCQAQDRGFPVSFQSQSQLCHFLTMCVFTCTAQHAAINQGQLDWYAWVPNAPCTMRMPPPTTKEDVTMATVMGSLPDVRQACLQMAISWHLSRRQPDMVPLGHHKEKYFSGPKPKAVLNQFRTDLEKLEKEITARNEQLDWPYEYLKPSCIENSVTI

SEQ ID NO: 45 - DNA, 1556 bp, Homo sapiens
  CDS (209)..(1249)
acttgtttcactttgtttttggacatagctgagccatgtacttcaaacagaaggcagccaattactaacttctggttgctaggtgtggcttcctttaaaatcctataaaatcagaagcccaagtctccactgccagtgtgaaatcttcagagaagaatttctctttagttctttgcaagaaggtagagataaagacactttttcaaaaatggcaatggtatcagaattcctcaagcaggcctggtttattgaaaatgaagagcaggaatatgttcaaactgtgaagtcatccaaaggtggtcccggatcagcggtgagcccctatcctaccttcaatccatcctcggatgtcgctgccttgcataaggccataatggttaaaggtgtggatgaagcaaccatcattgacattctaactaagcgaaacaatgcacagcgtcaacagatcaaagcagcatatctccaggaaacaggaaagcccctggatgaaacactgaagaaagcccttacaggtcaccttgaggaggttgttttagctctgctaaaaactccagcgcaatttgatgctgatgaacttcgtgctgccatgaagggccttggaactgatgaagatactctaattgagattttggcatcaagaactaacaaagaaatcagagacattaacagggtctacagagaggaactgaagagagatctggccaaagacataacctcagacacatctggagattttcggaacgctttgctttctcttgctaagggtgaccgatctgaggactttggtgtgaatgaagacttggctgattcagatgccagggccttgtatgaagcaggagaaaggagaaaggggacagacgtaaacgtgttcaataccatccttaccaccagaagctatccacaacttcgcagagtgtttcagaaatacaccaagtacagtaagcatgacatgaacaaagttctggacctggagttgaaaggtgacattgagaaatgcctcacagctatcgtgaagtgcgccacaagcaaaccagctttctttgcagagaagcttcatcaagccatgaaaggtgttggaactcgccataaggcattgatcaggattatggtttcccgttctgaaattgacatgaatgatatcaaagcattctatcagaagatgtatggtatctccctttgccaagccatcctggatgaaaccaaaggagattatgagaaaatcctggtggctctttgtggaggaaactaaacattcccttgatggtctcaagctatgatcagaagactttaattatatattttcatcctataagcttaaataggaaagtttcttcaacaggattacagtgtagctacctacatgctgaaaaatatagcctttaaatcatttttatattataactctgtataatagagataagtccattttttaaaaatgttttccccaaaccataaaaccctatacaagttgttctagtaacaatacatgagaaagatgtctatgtagctgaaaataaaatgacgtcacaagacaaaaaaaaaaaaaaaaaaaaaaa

SEQ ID NO: 46 - protein, 346 aa, Homo sapiens
MAMVSEFLKQAWFIENEEQEYVQTVKSSKGGPGSAVSPYPTFNPSSDVAALHKAIMVKGVDEATIIDILTKRNNAQRQQIKAAYLQETGKPLDETLKKALTGHLEEVVLALLKTPAQFDADELRAAMKGLGTDEDTLIEILASRTNKEIRDINRVYREELKRDLAKDITSDTSGDFRNALLSLAKGDRSEDFGVNEDLADSDARALYEAGERRKGTDVNVFNTILTTRSYPQLRRVFQKYTKYSKHDMNKVLDLELKGDIEKCLTAIVKCATSKPAFFAEKLHQAMKGVGTRHKALIRIMVSRSEIDMNDIKAFYQKMYGISLCQAILDETKGDYEKILVALCGGN

SEQ ID NO: 47 - DNA, 2158 bp, Homo sapiens
  CDS (228)..(1193)
gccccaggtgcgcttcccctagagagggattttccggtctcgtgggcagaggaacaaccaggaacttgggctcagtctccaccccacagtggggcggatccgtcccggataagacccgctgtctggccctgagtagggtgtgacctccgcagccgcagaggaggagcgcagcccggcctcgaagaacttctgcttgggtggctgaactctgatcttgacctagagtcatggccatggcaaccaaaggaggtactgtcaaagctgcttcaggattcaatgccatggaagatgcccagaccctgaggaaggccatgaaagggctcggcaccgatgaagacgccattattagcgtccttgcctaccgcaacaccgcccagcgccaggagatcaggacagcctacaagagcaccatcggcagggacttgatagacgacctgaagtcagaactgagtggcaacttcgagcaggtgattgtggggatgatgacgcccacggtgctgtatgacgtgcaagagctgcgaagggccatgaagggagccggcactgatgagggctgcctaattgagatcctggcctcccggacccctgaggagatccggcgcataagccaaacctaccagcagcaatatggacggagccttgaagatgacattcgctctgacacatcgttcatgttccagcgagtgctggtgtctctgtcagctggtgggagggatgaaggaaattatctggacgatgctctcgtgagacaggatgcccaggacctgtatgaggctggagagaagaaatgggggacagatgaggtgaaatttctaactgttctctgttcccggaaccgaaatcacctgttgcatgtgtttgatgaatacaaaaggatatcacagaaggatattgaacagagtattaaatctgaaacatctggtagctttgaagatgctctgctggctatagtaaagtgcatgaggaacaaatctgcatattttgctgaaaagctctataaatcgatgaagggcttgggcaccgatgataacaccctcatcagagtgatggtttctcgagcagaaattgacatgttggatatccgggcacacttcaagagactctatggaaagtctctgtactcgttcatcaagggtgacacatctggagactacaggaaagtactgcttgttctctgtggaggagatgattaaaataaaaatcccagaaggacaggaggattctcaacactttgaatttttttaacttcatttttctacactgctattatcattatctcagaatgcttatttccaattaaaacgcctacagctgcctcctagaatatagactgtctgtattattattcacctataattagtcattatgatgctttaaagctgtacttgcatttcaaagcttataagatataaatggagattttaaagtagaaataaatatgtattccatgtttttaaaagattactttctactttgtgtttcacagacattgaatatattaaattattccatattttcttttcagtgaaaaattttttaaatggaagactgttctaaaatcacttttttccctaatccaatttttagagtggctagtagtttcttcatttgaaattgtaagcatccggtcagtaagaatgcccatccagttttctatatttcatagtcaaagccttgaaagcatctacaaatctctttttttaggttttgtccatagcatcagttgatccttactaagtttttcatgggagacttccttcatcacatcttatgttgaaatcactttctgtagtcaaagtataccaaaaccaatttatctgaactaaattctaaagtatggttatacaaaccatatacatctggttaccaaacataaatgctgaacattccatattattatagttaatgtcttaatccagcttgcaagtgaatggaaaaaaaaataagcttcaaactaggtattctgggaatgatgtaatgctctgaatttagtatgatataaagaaaacttttttgtgctaaaaatactttttaaaatcaattttgttgattgtagtaatttctatttgcactgtgcctttcaactccagaaacattctgaagatgtacttggatttaattaaaaagttcactttgtaagaaaaaaaaaaaaaaaaaa

SEQ ID NO: 48 - protein, 321 aa, Homo sapiens
MAMATKGGTVKAASGFNAMEDAQTLRKAMKGLGTDEDAIISVLAYRNTAQRQEIRTAYKSTIGRDLIDDLKSELSGNFEQVIVGMMTPTVLYDVQELRRAMKGAGTDEGCLIEILASRTPEEIRRISQTYQQQYGRSLEDDIRSDTSFMFQRVLVSLSAGGRDEGNYLDDALVRQDAQDLYEAGEKKWGTDEVKFLTVLCSRNRNHLLHVFDEYKRISQKDIEQSIKSETSGSFEDALLAIVKCMRNKSAYFAEKLYKSMKGLGTDDNTLIRVMVSRAEIDMLDIRAHFKRLYGKSLYSFIKGDTSGDYRKVLLVLCGGDD

SEQ ID NO: 49 - DNA, 3782 bp, Homo sapiens
  CDS (174)..(1748)
gtctttacgtagacgtcgggggcgcagccgcgctgtgcgcggtgactggcggctgcactggcggcagctggaggtgtaatagtgcgggtagtgggtttggagaagttccgaggcggcggtggcgccggtcaggacaaggatagcggaaccgggccctgggcttgtcgctcaccatgccgacagtagaggagctttaccgcaattatggcatcctggccgatgccacggagcaagtgggccagcataaagatgcctatcaagtgatattggatggtgtgaaaggtggtactaaggaaaagcgattagcagctcaatttattccgaaattctttaagcattttccagaattggctgattctgctatcaatgcacagttagacctctgtgaggatgaagatgtatctattcgacgtcaagcaattaaagaactgcctcaatttgccactggagaaaatcttcctcgagtggcagatatactaacgcaacttttgcagacagatgactctgcagaatttaacctagtgaacaatgccctattaagtatatttaaaatggatgcaaaagggactttaggtgggttgttcagccaaatacttcaaggagaggacattgttagagaacgagcaattaaattcctttctacaaaacttaagactttaccagatgaagtcttaacaaaggaagtggaagagcttatactaactgaatccaaaaaggtcctagaagatgtgactggtgaagaatttgttctatttatgaagatactgtctgggttaaaaagcttacagacagtgagtggaagacagcaacttgtagagttggtggctgaacaggccgacctagaacagaccttcaatccctcggatcctgactgtgtggacaggctcttacagtgcactcggcaggcagtacccctcttctctaaaaatgtccattccacaaggtttgtgacatatttctgtgagcaggttctccctaacctcggtaccttgactaccccagtggaaggtcttgatatacagttggaggtattgaaattgttggcggagatgagttcattttgtggtgacatggaaaaactagaaacaaatttaaggaaactatttgataagttattggaatacatgcccctccctccagaagaggcagaaaatggagagaatgctggtaatgaagaacccaagctacagttcagttatgtggaatgtttgttgtacagttttcaccagttgggccgaaaacttccagatttcttaacagccaaactgaatgcagaaaagctcaaagatttcaaaatcaggctgcagtactttgcacggggcctgcaagtttatatcagacaacttcgcttagctctccagggtaaaacgggtgaggccttaaaaacagaagagaacaagattaaagtcgttgcattgaaaataacaaacaatatcaatgttttaatcaaggatctcttccacattcctccttcttataagagcacagtaacactatcctggaaacctgtacaaaaggttgagattgggcaaaagagagccagtgaagatacaacttcaggttcaccacccaagaaatcttcagcaggaccaaaaagagatgccaggcagatttataaccctcccagtgggaaatatagcagcaatttgggcaactttaattatgagcagagaggagccttcaggggaagtagaggtggccgaggttggggcacacgaggaaatcgtagtcggggaagactctactgaataagacatcagcattcttcagcattgtcatgagcttaatatacttaaattctactactcattggattgccggggatgtccctttaaacagactgctgccttcagctaaaaacttaatgttctttatacctttgtatgtatgacctacttttgtaacagaccatggttgtgtccaaggtaaaaccacagtgatatttttggatgctttgtctgcaatcttgacttgtttttgcagtatcattattcagacttcaaattgtgaatcttttaaacatcttgataatttgttgttgagagctgttcattctaaaatgtaatgaaattcagtctagttctgctgataaagatcatcagttttgaaaggttactgattttcctcttccctcttagttttttacccaatatatggagaagagtaatggtcaatcttaacattttgttttaattgtttaataaagctgctgggcagtggtgcagcattcctacctagtgtcataaaagcaaaatacttacatagctttcttaaaatataggaatgacattacatttttaggagaaagtaagttgctttgcaccgcctacttaattcttttccatatattgtgatacaaacttttgaatatggaatcttactatttgaatagaaatgtgtatgtataatatacatacatacataagcatatatgtgtgtgtgtgtgtgtatatatatatatatgcatgctgtgaaacttgactacacaacataaatcactttttaaattccaggaacgggtagtctgacacggtgattatccttttgaggctgaatccgttattaacttgttatttaggtttttactcccagtagcaagggattctaagttagttgcacttacatgattattgttatttaaaactaagaataaaggctgcattttcaaagataaattggaattgctgttggtgaaataacaaccaaaatactgaatctgatgtacatacaggtttctacaggaagagatggtataatttacaatttggagatttaataaccagggctacccagaaaaagtgacttgataacatggtaccaataagtaagggatgctctctcggtttgcttttgccactttcaagattttaacttctcaggttattaatcaaaattattgtataagttagccaatagaatttttaggttaaaacaacagatggggggtttgtggagtgtttaatgtcatgggcatttttagtagcatagaccctttgttctgcatttgaatgtttcgtatatttttgtttcacagttaatcttccctccccaagtttgctattcaaatcaactgcctgaatgacatttctagtagtctgatgtatttttctgaggaatagtttgtgattccaatgcaggtgtcttcattaccattacctctacactgcagaagaagcaaaactcctttattagaattactgcacatgtgtatggggaaaatagttctgaaaggctagaatgatacaagtgagcaaaagttggtcagcttggctatggagtggtggcaataatctctaaacattccaaaagaccatgagctgaacctaaactcccttggaatctgaacaaaggaatataaaattgccatttgaaaactgaccagctaatctggacctcagagatagatcagccagtggcccaaagccatttcaagtacagaaattatagagactacagctaaataaatttgaacattaaatataattttaccactttttgtctttataagcatatttgtaaactcagaactgagcagaagtgactttactttctcaagtttgatactgagttgactgttcccttatccctcacccttccccttccctttcctaaggcaatagtgcacaacttaggttatttttgcttccgaatttgaatgaaaaacttaatgccatggatttttttcttttgcaagacacctgtttatcatcttgtttaaatgtaaatgtccccttatgcttttgaaataaatttccttttgtaattttgaaaaaaaaaaaaaa

SEQ ID NO: 50 - protein, 524 aa, Homo sapiens
MPTVEELYRNYGILADATEQVGQHKDAYQVILDGVKGGTKEKRLAAQFIPKFFKHFPELADSAINAQLDLCEDEDVSIRRQAIKELPQFATGENLPRVADILTQLLQTDDSAEFNLVNNALLSIFKMDAKGTLGGLFSQILQGEDIVRERAIKFLSTKLKTLPDEVLTKEVEELILTESKKVLEDVTGEEFVLFMKILSGLKSLQTVSGRQQLVELVAEQADLEQTFNPSDPDCVDRLLQCTRQAVPLFSKNVHSTRFVTYFCEQVLPNLGTLTTPVEGLDIQLEVLKLLAEMSSFCGDMEKLETNLRKLFDKLLEYMPLPPEEAENGENAGNEEPKLQFSYVECLLYSFHQLGRKLPDFLTAKLNAEKLKDFKIRLQYFARGLQVYIRQLRLALQGKTGEALKTEENKIKVVALKITNNINVLIKDLFHIPPSYKSTVTLSWKPVQKVEIGQKRASEDTTSGSPPKKSSAGPKRDARQIYNPPSGKYSSNLGNFNYEQRGAFRGSRGGRGWGTRGNRSRGRLY

SEQ ID NO: 51 - DNA, 2293 bp, Homo sapiens
  CDS (583)..(1431)
atttgggagagtgctgtgactcatgctggactctaacccacgagggtttctcagagtcagcagctgggggatgaagaagtgaaaagtgactggcaggaaattctgcaagcaaggaaagggaaagagaaatgaactggtgcaggtctgcgggaagagaatgaggctggatcctcaaaatcacaggaggaagcaggcccagacctcagaggcagaaagagaaagaaaccagagcttagagtcaggaggaggaaaccagaccccggagccacaaggagagggctggatccccggctcagagggaagagtgtcgccgcctctgcctgcgtagccccggccatggctctgtagcctcgacccctttgtgcccccggcccgtctccgcgctcaccacgcctgcgctctccgctcccaccttctttcttcagccgaggccgccgccgcctctccttgctgcagccatggagtcttccactttcgccttggtgcctgtcttcgcccacctgagcatcctccagagcctcgtgccagctgctggtgcagcctctcctgttgccatcagtgcccagcacctgtgctacagccatgtcactcctggcgaccctggggctggagctggacagggccctgctcccagctagtgggctgggatggctcgtagactatgggaaactccccccggcccctgcccccctggctccctatgaggtccttgggggagccctggagggcgggcttccagtggggggagagcccctggcaggtgatggcttctctgactggatgactgagcgagttgatttcacagctctcctccctctggagcctcccttaccccccggcaccctcccccaaccttccccaaccccacctgacctggaagctatggcctccctcctcaagaaggagctggaacagatggaagacttcttcctagatgccccgcccctcccaccaccctccccgccgccactaccaccaccaccactaccaccagccccctccctccccctgtccctcccctcctttgacctcccccagccccctgtcttggatactctggacttgctggccatctactgccgcaacgaggccgggcaggaggaagtggggatgccgcctctgcccccgccacagcagccccctcctccttctccacctcaaccttctcgcctggccccctacccacatcctgccaccacccgaggggaccgcaagcaaaagaagagagaccagaacaagtcggcggctctgaggtaccgccagcggaagcgggcagagggtgaggccctggagggcgagtgccaggggctggaggcacggaatcgcgagctgaaggaacgggcagagtccgtggagcgcgagatccagtacgtcaaggacctgctcatcgaggtttacaaggcccggagccagaggacccgtagctgctagaagggcaggggtgtggcttctgggggctggtcttcagctctggcgccttcatccccctgcctctaccttcattccaaacccctctcggccgggtgcagtggcttatgcttgtaatcccagcactttgggaggccaaggcaggaggatcgtttgaggccaggaggtcaataccagcctgggcaacatagtaagaccctgtctctattaaaaaaaaaaaatcaacccttcttccccaccaaaccacccaactcctctctactcttatccttttatcctctgtctctgcttatcacctctcttgcgtatttctggatctccttccctcctttctcgtccaaatcatgaaatgtttggccttagtcaatgtctatgcccgtcacataacagccgaggcaccgaggcccacagggaagcagctgggagcttggaaacctggtctcttgaatttcaaacctggtttcttacaggtggttgtctggggtgggtggagtggcgacaggatagagctgaaggactatgcaaatgaggaagtaagtcagggcgggctttgagaaggggacccatatcctacaggcaaaaagcaggctaggtgaccttgggacactacgctaagggagggaggctaaaggcggccaggtttgcagtgcgggaagatgagcaggccagtgggaggaggggcagggcagggctgtagttggtgactgggtgttcattttagctctaagaaaaaaaatcagtgtttcgtgaaggtgttggagaggggctgtgtctgggtgagggatggcggggtactgatttttttgggaggttatgagcaaaaataaaacgaaacatttcctctggcaaaaaaaaaaaaaaaaaa

SEQ ID NO: 52 - protein, 282 aa, Homo sapiens
MSLLATLGLELDRALLPASGLGWLVDYGKLPPAPAPLAPYEVLGGALEGGLPVGGEPLAGDGFSDWMTERVDFTALLPLEPPLPPGTLPQPSPTPPDLEAMASLLKKELEQMEDFFLDAPPLPPPSPPPLPPPPLPPAPSLPLSLPSFDLPQPPVLDTLDLLAIYCRNEAGQEEVGMPPLPPPQQPPPPSPPQPSRLAPYPHPATTRGDRKQKKRDQNKSAALRYRQRKRAEGEALEGECQGLEARNRELKERAESVEREIQYVKDLLIEVYKARSQRTRSC

SEQ ID NO: 53 - DNA, 1551 bp, Homo sapiens
  CDS (57)..(1145)
gggcgtctccgccgcagctcggctcccgcgcgctcagcaccgccagcggcggccagatgcaggcggagcgaggagctcggggaggccgtgggcggcggccaggccgcggccggcctggcggagatcgccacagcgagcggcccggagccgcagcggcggtagccagaggcggcggcggaggcggcggcggggacggaggcggacgccggggccgtggccgtggccggggcttccgcggcgctcgcggaggccgaggaggaggaggcgccccgcgaggcagccgccgggagccgggaggctggggcgcaggggccagcgcgccggttgaagatgacagcgatgcagagacctatggagaagagaatgatgaacagggaaattattctaaaagaaagattgtctctaactgggatcgatatcaagatattgaaaaagaggtcaataatgaaagtggagagtcacagaggggaacagatttcagtgtcctccttagctctgcaggggactcattctcacagttccggtttgctgaggagaaagaatgggatagtgaagcttcttgtccaaaacagaattcagcattttatgtggatagtgagttattggttcgagcccttcaagagctgcctctctgcctccgactcaacgttgctgccgaactggtccagggtacagttcctttagaggttcctcaggtgaaaccaaagagaactgatgatggcaagggattagggatgcagttaaaggggcccttggggcctggaggaagggggcccatctttgagctgaaatctgtggctgctggctgccctgtgttgctgggcaaagacaacccaagcccgggtccttcaagggattctcagaaacccacttccccactgcagtcagcaggagaccatttggaagaagaactagatctgttgcttaatttagatgcacctataaaagagggagataacatcttaccagatcagacgtctcaggacctgaaatccaaggaagatggggaggtggtccaagaggaagaagtttgtgcaaaaccatctgtgactgaagaaaaaaacatggaacctgagcaaccaagtacctccaaaaatgttaccgaggaagagctggaagactggttggacagcatgatttcctaaaaaggggaaaaaaagtgcctgaagcaaatcttggttgccttctaacggcaggtgggcataaggctgtccttcaggaccagccagtttacaagcatgtctcaagctagtgtgttccattatgctcacagcagtaaatgcctacctctgtgtttgacatctgaaagaatacattgaagcagcttgttgcatttgtttttctggcttagtaatctaatagatttccttaagggcaggagatagactctggcccttgtttctagcctccttccttgcagtgtttacaacatagccagtgtttacagcatagcagatgctgctgctgattaagagaatagatgcaaacaaggcatgcatttggccaaaataaacaaatgctggtctgtccaaaaaaaaaaaaaaaaaaaaa

SEQ ID NO: 54 - protein, 362 aa, Homo sapiens
MQAERGARGGRGRRPGRGRPGGDRHSERPGAAAAVARGGGGGGGGDGGGRRGRGRGRGFRGARGGRGGGGAPRGSRREPGGWGAGASAPVEDDSDAETYGEENDEQGNYSKRKIVSNWDRYQDIEKEVNNESGESQRGTDFSVLLSSAGDSFSQFRFAEEKEWDSEASCPKQNSAFYVDSELLVRALQELPLCLRLNVAAELVQGTVPLEVPQVKPKRTDDGKGLGMQLKGPLGPGGRGPIFELKSVAAGCPVLLGKDNPSPGPSRDSQKPTSPLQSAGDHLEEELDLLLNLDAPIKEGDNILPDQTSQDLKSKEDGEVVQEEEVCAKPSVTEEKNMEPEQPSTSKNVTEEELEDWLDSMIS

SEQ ID NO: 55 - DNA, 912 bp, Homo sapiens
  CDS (17)..(772)
acagacctgccccgccatgacccggctgacagtcctggccctgctggctggtctgctggcgtcctcgagggccggctccagcccccttttggacatcgttggcggccggaaggcgaggccccgccagttcccgttcctggcctccattcagaatcaaggcaggcacttctgcgggggtgccctgatccatgcccgcttcgtgatgaccgcggccagctgcttccaaagccagaaccccggggttagcaccgtggtgctgggtgcctatgacctgaggcggcgggagaggcagtcccgccagacgttttccatcagcagcatgagcgagaatggctacgacccccagcagaacctgaacgacctgatgctgcttcagctggaccgtgaggccaacctcaccagcagcgtgacgatactgccactgcctctgcagaacgccacggtggaagccggcaccagatgccaggtggccggctgggggagccagcgcagtggggggcgtctctcccgttttcccaggtttgtcaacgtgactgtgacccccgaggaccagtgtcgccccaacaacgtgtgcaccggtgtgctcacccgccgcggtggcatctgcaatggggacgggggcacccccctcgtctgcgagggcctggcccacggcgtggcctccttttccctggggccctgtggccgaggccctgacttcttcacccgagtggcgctcttccgagactggatcgatggtgttctcaacaacccgggaccggggccagcctaggggggcctgtgacctcccatggagcccagccccgccctccacacctccggcgctccgcacccacctcccacggccccgcccctgcccccgctccggccagaggggccctggctgtaataaagaagccgatctctcctctg

SEQ ID NO: 56 - protein, 251 aa, Homo sapiens
MTRLTVLALLAGLLASSRAGSSPLLDIVGGRKARPRQFPFLASIQNQGRHFCGGALIHARFVMTAASCFQSQNPGVSTVVLGAYDLRRRERQSRQTFSISSMSENGYDPQQNLNDLMLLQLDREANLTSSVTILPLPLQNATVEAGTRCQVAGWGSQRSGGRLSRFPRFVNVTVTPEDQCRPNNVCTGVLTRRGGICNGDGGTPLVCEGLAHGVASFSLGPCGRGPDFFTRVALFRDWIDGVLNNPGPGPA

SEQ ID NO: 57 - DNA, 3885 bp, Homo sapiens
  CDS (88)..(1125)
aggccggggcggggctgggaagtagtcgggcggggttgtgagacgccgcgctcagcttccatcgctgggcggtcaacaagtgcgggcctggctcagcgcgggggggcgcggagaccgcgaggcgaccgggagcggctgggttcccggctgcgcgcccttcggccaggccgggagccgcgccagtcggagcccccggcccagcgtggtccgcctccctctcggcgtccacctgcccggagtactgccagcgggcatgaccgacccaccaggggcgccgccgccggcgctcgcaggccgcggatgaagaagaaaacccggcgccgctcgacccggagcgaggagttgacccggagcgaggagttgaccctgagtgaggaagcgacctggagtgaagaggcgacccagagtgaggaggcgacccagggcgaagagatgaatcggagccaggaggtgacccgggacgaggagtcgacccggagcgaggaggtgaccagggaggaaatggcggcagctgggctcaccgtgactgtcacccacagcaatgagaagcacgaccttcatgttacctcccagcagggcagcagtgaaccagttgtccaagacctggcccaggttgttgaagaggtcataggggttccacagtcttttcagaaactcatatttaagggaaaatctctgaaggaaatggaaacaccgttgtcagcacttggaatacaagatggttgccgggtcatgttaattgggaaaaagaacagtccacaggaagaggttgaactaaagaagttgaaacatttggagaagtctgtggagaagatagctgaccagctggaagagttgaataaagagcttactggaatccagcagggttttctgcccaaggatttgcaagctgaagctctctgcaaacttgataggagagtaaaagccacaatagagcagtttatgaagatcttggaggagattgacacactgatcctgccagaaaatttcaaagacagtagattgaaaaggaaaggcttggtaaaaaaggttcaggcattcctagccgagtgtgacacagtggagcagaacatctgccaggagactgagcggctgcagtctacaaactttgccctggccgagtgaggtgtagcagaaaaaggctgtgctgccctgaagaatggcgccaccagctctgccgtctctggagcggaatttacctgatttcttcagggctgctgggggcaactggccatttgccaattttcctactctcacactggttctcaatgaaaaatagtgtctttgtgattttgagtaaagctcctatctgttttctccttctgtctctgtggttgtactgtccagcaatccaccttttctggagagggccacctctgcccaaattttcccagctgtttggacctctgggtgctttctttgggctggtgagagctctaatttgccttgggccagtttcaggtttataggccccctcagtcttcagatacatgagggcttctttgctcttgtgatcgtgtagtcccatagctgtaaaaccagaatcaccaggaggttgcacctagtcaggaatattgggaatggcctagaacaaggtgtttggcacataagtagaccacttatccctcattgtgacctaattccagagcatctggctgggttgttgggttctagactttgtcctcacctcccagtgaccctgactagccacaggccatgagataccagggggccgttccttggatggagcctgtggttgatgcaaggcttccttgtccccaagcaagtcttcagaaggttagaacccagtgttgactgagtctgtgcttgaaaccaggccagagccatggattaggaagggcaaagagaaggcaccagaatgagtaaagcaggcaggtggtgaagccaaccataaacttctcaggagtgacatgtgcttccttcaaaggcatttttgttaaccatatccttctgagttctatgtttccttcacagctgttctatccattttgtggactgtcccccacccccaccccatcattgtttttaaaaaattaaggcctggcgcagcagctcatgcctataatcccagcactttgggaggctgaggcgggcggatcacttgaggccaggagtttgagaccagcccaggcaacatagcaaaaccccattctgctttaaaaaaaaaaaaaaaaaaaattagcttggcgtagtggcatgtgcctataatcccagctactggggaggctgaggcacaagaatcatttgaacctgggaggtagaggttgctgtgagccgagattacgcccctgcactccagcctgggtcacagagtgagactccatctcagaaaaaaaaaaaattgagtcaggtgcagtagctccttcctgtagtcccagctacttgggaggctgaggctagaggatcacttgagcccaggagtttgagtctagtctgggcaacatagcaagaccccatctctaaaatttaagtaagtaaaagtagataaataaaaagaaaaaaaaactgtttatgtgctcatcataaagtagaagagtggtttgcttttttttttttttttggattaatgaggaaatcattctgtggctctagtcataatttatgcttaataacattgatagtagccctttgcgctataactctacctaaagactcacatcatttggcagagagagagtcgttgaagtcccaggaattcaggactgggcaggttaagacctcagacaaggtagtagaggtagacttgtggacaaggctcgggtcccagcccaccgcaccccaactttaatcagagtggttcactattgatctatttttgtgtgatagctgtgtggcgtgggccacaacatttaatgagaagttactgtgcaccaaactgccgaacaccattctaaactattcatatatattagtcatttaattcttacataacttgagaggtagacagatatccttattttagagatgaggaaaccaagagaacttaggtcattagcgcaaggttgtagagtaagcggcaaagccaagacacaaagctgggtggtttggtttcagagccagtgcttttcccctctactgtactgcctctcaaccaacacagggttgcacaggcccattctctgatttttttcctcttgtcctctgcctctccctctagctcccacttcctctctgctctagttcattttctttagagcagcccgagtgatcatgaagtgcaaatcttgccatgtcagtcccctgcttagaaccctccaatggctcactttctctttaggcaaaagtctttaccccatgccttctcccatctcatctcaaccccctcatttgttggctgtctgctgtcagccactcttctttcaggtcctcagatgcactgcaccctctcctgcctgggggtctttgctcctgctactacctctgcttgaacagctcctcaccttccttcctccaaccctacccttgtataggtgacttttgttcatccttcagaattcaactcacatgtctcttgcatggagaaccctcacctactgtgttgagaccctgtccagcccccaggtgggatcctctctcgacttcccatacatttctttcacagcatttacatagtccatgatagtttacttgtgggattatttggttaatctttgcctttaacaccagggttccttgggtgaaggagcttctttatcttggtaacagcattatttcaagcataacttgtaatatagttatattacatatataacatatatatatataacataacatatataacatatataacaagcataacttgttatatagtcttgtatatagtaagacctcaataaatatttggagaacaaaaaaaaaaaaaaa

SEQ ID NO: 58 - protein, 345 aa, Homo sapiens
MAQRGGARRPRGDRERLGSRLRALRPGREPRQSEPPAQRGPPPSRRPPARSTASGHDRPTRGAAAGARRPRMKKKTRRRSTRSEELTRSEELTLSEEATWSEEATQSEEATQGEEMNRSQEVTRDEESTRSEEVTREEMAAAGLTVTVTHSNEKHDLHVTSQQGSSEPVVQDLAQVVEEVIGVPQSFQKLIFKGKSLKEMETPLSALGIQDGCRVMLIGKKNSPQEEVELKKLKHLEKSVEKIADQLEELNKELTGIQQGFLPKDLQAEALCKLDRRVKATIEQFMKILEEIDTLILPENFKDSRLKRKGLVKKVQAFLAECDTVEQNICQETERLQSTNFALAE

SEQ ID NO: 59 - DNA, 2575 bp, Homo sapiens
  CDS (367)..(1068)
ggaggaggaagcaagcgagggggctggttcctgagcttcgcaattcctgtgtcgccttctgggctcccagcctgccgggtcgcatgatccctccggccggagctggtttttttgccagccaccgcgaggccggctgagttaccggcatccccgcagccacctcctctcccgacctgtgatacaaaagatcttccgggggctgcacctgcctgcctttgcctaaggcggatttgaatctctttctctcccttcagaatcttatcttggctttggatcttagaagagaatcactaaccagagacgagactcagtgagtgagcaggtgttttggacaatggactggttgagcccatccctattataaaaatgtctcagagcaaccgggagctggtggttgactttctctcctacaagctttcccagaaaggatacagctggagtcagtttagtgatgtggaagagaacaggactgaggccccagaagggactgaatcggagatggagacccccagtgccatcaatggcaacccatcctggcacctggcagacagccccgcggtgaatggagccactggccacagcagcagtttggatgcccgggaggtgatccccatggcagcagtaaagcaagcgctgagggaggcaggcgacgagtttgaactgcggtaccggcgggcattcagtgacctgacatcccagctccacatcaccccagggacagcatatcagagctttgaacaggtagtgaatgaactcttccgggatggggtaaactggggtcgcattgtggcctttttctccttcggcggggcactgtgcgtggaaagcgtagacaaggagatgcaggtattggtgagtcggatcgcagcttggatggccacttacctgaatgaccacctagagccttggatccaggagaacggcggctgggatacttttgtggaactctatgggaacaatgcagcagccgagagccgaaagggccaggaacgcttcaaccgctggttcctgacgggcatgactgtggccggcgtggttctgctgggctcactcttcagtcggaaatgaccagacactgaccatccactctaccctcccacccccttctctgctccaccacatcctccgtccagccgccattgccaccaggagaaccactacatgcagcccatgcccacctgcccatcacagggttgggcccagatctggtcccttgcagctagttttctagaatttatcacacttctgtgagacccccacacctcagttcccttggcctcagaattcacaaaatttccacaaaatctgtccaaaggaggctggcaggtatggaagggtttgtggctgggggcaggagggccctacctgattggtgcaacccttaccccttagcctccctgaaaatgtttttctgccagggagcttgaaagttttcagaacctcttccccagaaaggagactagattgcctttgttttgatgtttgtggcctcagaattgatcattttccccccactctccccacactaacctgggttccctttccttccatccctaccccctaagagccatttaggggccacttttgactagggattcaggctgcttgggataaagatgcaaggaccaggactccctcctcacctctggactggctagagtcctcactcccagtccaaatgtcctccagaagcctctggctagaggccagccccacccaggagggagggggctatagctacaggaagcaccccatgccaaagctagggtggcccttgcagttcagcaccaccctagtcccttcccctccctggctcccatgaccatactgagggaccaactgggcccaagacagatgccccagagctgtttatggcctcagctgcctcacttcctacaagagcagcctgtggcatctttgccttgggctgctcctcatggtgggttcaggggactcagccctgaggtgaaagggagctatcaggaacagctatgggagccccagggtcttccctacctcaggcaggaagggcaggaaggagagcctgctgcatggggtggggtagggctgactagaagggccagtcctgcctggccaggcagatctgtgccccatgcctgtccagcctgggcagccaggctgccaaggccagagtggcctggccaggagctcttcaggcctccctctctcttctgctccacccttggcctgtctcatccccaggggtcccagccaccccgggctctctgctgtacatatttgagactagtttttattccttgtgaagatgatatactatttttgttaagcgtgtctgtatttatgtgtgaggagctgctggcttgcagtgcgcgtgcacgtggagagctggtgcccggagattggacggcctgatgctccctcccctgccctggtccagggaagctggccgagggtcctggctcctgaggggcatctgcccctcccccaacccccaccccacacttgttccagctctttgaaatagtctgtgtgaaggtgaaagtgcagttcagtaataaactgtgtttactcagtgaaaaaaaaaaaaaaaaaa

SEQ ID NO: 60 - protein, 233 aa, Homo sapiens
MSQSNRELVVDFLSYKLSQKGYSWSQFSDVEENRTEAPEGTESEMETPSAINGNPSWHLADSPAVNGATGHSSSLDAREVIPMAAVKQALREAGDEFELRYRRAFSDLTSQLHITPGTAYQSFEQVVNELFRDGVNWGRIVAFFSFGGALCVESVDKEMQVLVSRIAAWMATYLNDHLEPWIQENGGWDTFVELYGNNAAAESRKGQERFNRWFLTGMTVAGVVLLGSLFSRK

SEQ ID NO: 61 - DNA, 3060 bp, Homo sapiens
  CDS (282)..(1634)
gggagtggccgctctaggcagcggggaggtcgcggggttgaggggggttgtgaaaggagagcggcctctcctctatggtcacggggccggggcacgcttcccccactctgtcttgttacttccggtagcgaagcctctccctcttcctctgctcccgcggggtctgtgctgagaataatggcccggttggcccgggacgagtggaatgattaatgatgttttgcagcagttttctacgtctgaaattttttatgtctctggaacccagaatttgctaagagatggaggaacctcagaaaagctatgtgaacacaatggaccttgagagagatgaacctctcaaaagcaccggccctcagatttctgttagtgaattttcttgccactgctgctacgacatcctggttaaccccaccaccttgaactgtgggcacagcttctgccgtcactgccttgctttatggtgggcatcttcaaagaaaacagaatgtccagaatgcagagaaaaatgggaaggtttccccaaagtcagtattctcctcagggatgccattgaaaagttatttcctgatgccattagactgagatttgaagacattcagcagaataatgacatagtccaaagtcttgcagcctttcagaaatatgggaatgatcagattcctttagctcctaacacaggccgagcgaatcagcagatgggagggggattcttttccggtgtgctcacagctttaactggagtggcagtggtcctgctcgtctatcactggagcagcagggaatctgaacacgacctcctggtccacaaggctgtggccaaatggacggcggaagaagttgtcctctggctggagcagctgggcccttgggcatctctttacagggaaaggtttttatctgaacgagtaaatggaaggttgcttttaactttgacagaggaagaattttccaagacgccctataccatagaaaacagcagccacaggagagccatcctcatggagctagaacgtgtcaaagcattaggcgtgaagcccccccagaatctctgggaatataaggctgtgaacccaggcaggtccctgttcctgctatacgccctcaagagctcccccaggctgagtctgctctacctgtacctgtttgactacaccgacaccttcctacctttcatccacaccatctgccctctgcaagaagacagctctggggaggacatcgtcaccaagcttctggatcttaaggagcctacgtggaagcagtggagagagttcctggtcaaatactccttccttccataccagctgattgctgagtttgcttgggactggttggaggtccattactggacatcacggtttctcatcatcaatgctatgttactctcagttctggaattattctccttttggagaatctggtcgagaagtgaactgaagaccgtgcctcagaggatgtggagccatttctggaaagtatcaacgcaggggctttttgtggccatgttctggcccctcatccctcagtttgtttgcaactgtttgttttactgggccctgtactttaacccaattattaacattgatcttgtggtcaaggaactccggcggctggaaacccaggtgttgtgactggcactgcccaggctgagactcttcaagtcccgctgacgtctgagctttgatgcttaagaggggtgaggcagggagcggacttcctattttctaccctcagtaaaacaaggtgctgctttgtatatcaaaagctccaaccatgtcctctccccctcagcctgtgggtggcacgagcaaggactgacatccgcacagggaggattgtctgtttggctgacacagcagcagcccttcccacccagccaccttcctcacagggactaggaggctcagtccccaacggctggcaagactcagggtcctcagtggacatggtgtgggtgacatcagaagggtgccacatcagtcccctccccaacctcagtgactgacagaggatccggatctcagagcctgagaccaggtttattggggcctggcctgtcctctaagtcaagtttaggaaaacaaggataagattctgtcataggcatagagagttgcacataaaaaataccgaagaaaacccaaaattcaatcaacaattctgtcttattgaagagttgctaggattcagagtaaaactcaaaggattcagtttgagcctagaatgatggttagacttgtagtcactgggcttttgttttgctttatggaaatcattgaaggtctggatccctttctctgaatggagagattgagagggatgtcgggcagttcccattagatttagtggccttcatgttattcagaattgttttggtgatacctcacccctgtaatcccagcactttgggtgggtgaggcaggcggatcacttgaagccaggacttcaagaccagcttggccaacatggtgaaacctcatctctactaaaaatacaaaaattagccaagtgtgatggcacatacctgtaatcccagctacttggaattggaaatcgcctgaacccaggaggcggaggttgcagggagggagactgcaccactgcacttcagcctgggtgacagagggagactctgtcttaaaaaaaaaaaaaaaatcatctgtaaaataaattccgggatagtcgttttgttcaaggaaatgttttgtaaattgagctcacactatataatctttattgtcctatcctgatgtataatacagcaggtataattacaccaagcgctatagttataaatatggcatgaagtgaactatggccttttatttccttccagtgtgaacacagcaggtgtgagatgtcatcttggaagacaggccttgcagaaataggcctacatccaaaatattatcttgtgactccatgaaccattcattaaccctttgtatctttgagtgaaaattttactcaaaagttgcatctggaagttcgaagaaattacttgaaataaaaataaagatttctatatagataaaacctaaaaaaaaaaaaaaaaaa

SEQ ID NO: 62 - protein, 450 aa, Homo sapiens
MEEPQKSYVNTMDLERDEPLKSTGPQISVSEFSCHCCYDILVNPTTLNCGHSFCRHCLALWWASSKKTECPECREKWEGFPKVSILLRDAIEKLFPDAIRLRFEDIQQNNDIVQSLAAFQKYGNDQIPLAPNTGRANQQMGGGFFSGVLTALTGVAVVLLVYHWSSRESEHDLLVHKAVAKWTAEEVVLWLEQLGPWASLYRERFLSERVNGRLLLTLTEEEFSKTPYTIENSSHRRAILMELERVKALGVKPPQNLWEYKAVNPGRSLFLLYALKSSPRLSLLYLYLFDYTDTFLPFIHTICPLQEDSSGEDIVTKLLDLKEPTWKQWREFLVKYSFLPYQLIAEFAWDWLEVHYWTSRFLIINAMLLSVLELFSFWRIWSRSELKTVPQRMWSHFWKVSTQGLFVAMFWPLIPQFVCNCLFYWALYFNPIINIDLVVKELRRLETQVL

SEQ ID NO: 63 - DNA, 10640 bp, Homo sapiens
  CDS (466)..(1908)
atactcagtcacacaagccatagcaggaaacagcgagcttgcagcctcaccgacgagtctcaactaaaagggactcccggagctaggggtggggactcggcctcacacagtgagtgccggctattggacttttgtccagtgacagctgagacaacaaggaccacgggaggaggtgtaggagagaagcgccgcgaacagcgatcgcccagcaccaagtccgcttccaggctttcggtttctttgcctccatcttgggtgcgccttcccggcgtctaggggagcgaaggctgaggtggcagcggcaggagagtccggccgcgacaggacgaactcccccactggaaaggattctgaaagaaatgaagtcagccctcagaaatgaagttgactgcctgctggctttctgttgactggcccggagctgtactgcaagacccttgtgagcttccctagtctaagagtaggatgtctgctgaagtcatccatcaggttgaagaagcacttgatacagatgagaaggagatgctgctctttttgtgccgggatgttgctatagatgtggttccacctaatgtcagggaccttctggatattttacgggaaagaggtaagctgtctgtcggggacttggctgaactgctctacagagtgaggcgatttgacctgctcaaacgtatcttgaagatggacagaaaagctgtggagacccacctgctcaggaaccctcaccttgtttcggactatagagtgctgatggcagagattggtgaggatttggataaatctgatgtgtcctcattaattttcctcatgaaggattacatgggccgaggcaagataagcaaggagaagagtttcttggaccttgtggttgagttggagaaactaaatctggttgccccagatcaactggatttattagaaaaatgcctaaagaacatccacagaatagacctgaagacaaaaatccagaagtacaagcagtctgttcaaggagcagggacaagttacaggaatgttctccaagcagcaatccaaaagagtctcaaggatccttcaaataacttcaggctccataatgggagaagtaaagaacaaagacttaaggaacagcttggcgctcaacaagaaccagtgaagaaatccattcaggaatcagaagcttttttgcctcagagcatacctgaagagagatacaagatgaagagcaagcccctaggaatctgcctgataatcgattgcattggcaatgagacagagcttcttcgagacaccttcacttccctgggctatgaagtccagaaattcttgcatctcagtatgcatggtatatcccagattcttggccaatttgcctgtatgcccgagcaccgagactacgacagctttgtgtgtgtcctggtgagccgaggaggctcccagagtgtgtatggtgtggatcagactcactcagggctccccctgcatcacatcaggaggatgttcatgggagattcatgcccttatctagcagggaagccaaagatgttttttattcagaactatgtggtgtcagagggccagctggaggacagcagcctcttggaggtggatgggccagcgatgaagaatgtggaattcaaggctcagaagcgagggctgtgcacagttcaccgagaagctgacttcttctggagcctgtgtactgcggacatgtccctgctggagcagtctcacagctcaccatccctgtacctgcagtgcctctcccagaaactgagacaagaaagaaaacgcccactcctggatcttcacattgaactcaatggctacatgtatgattggaacagcagagtttctgccaaggagaaatattatgtctggctgcagcacactctgagaaagaaacttatcctctcctacacataagaaaccaaaaggctgggcgtagtggctcacacctgtaatcccagcactttgggaggccaaggagggcagatcacttcaggtcaggagttcgagaccagcctggccaacatggtaaacgctgtccctagtaaaaatacaaaaattagctgggtgtgggtgtgggtacctgtattcccagttacttgggaggctgaggtgggaggatcttttgaacccaggagttcagggtcatagcatgctgtgattgtgcctacgaatagccactgcataccaacctgggcaatatagcaagatcccatctctttaaaaaaaaaaaaaaaggacaggaactatcttactcaatgtattagtcatgtttctctagagggacagaactaataggatacatgtatataaaaaggggagtttattaaggagtattgactcacatgatcacagggttaggtcccacaataggtcatctgcaagcaaggaagccaattcaagtcccaaagctgaagaacttggagtccaatgtttgagggcaggaagcattcagcatgagagaaagatggaggccagaagactacaccagtctagtctttccatgttttgcctgcttttattctggcagtgctggcagctgattagatggtgcccacccagattgaggatggtctgcctttcccagtccactgactcaaatgttaaatctcctttggcagcaccctcacagatgtacccgggaacactttgcatccttctattcaatcaagttgatactcagtattaaccatcacagtccatttgggcaactataccaaattaccatagaccaggtgacttaaacagcagttatttctcacagttccggaggctgggaaatccaacatctaagtggtagcatatctggtgtctggtaaggcatgcttccagatcttaccagatgtcagtcttttgatgttctcacatggcagaaaaagaggatgcaaactctcaagtatatctttaagggcacaaattccattcatgagggctctaccctcatcacctaattacctcccaaaggccccaccttctgatactgtcactttggggatactgtctcccctttgaattctggggggaatacaaacattcagtttgtaacaatagccttatgatttagaggttacttgttcattcacctagacctcaaattgcattttacagctagtcaagtatatctttctctgatttgatagtgtgacctaaaaggggaccattgtttgaaatatcattagagttgcttattattattattattattattattattattattattattattattgagacagagtttcattctgctgcccaggctggagtgcagtggcatcatcttggctcattgcaacctctgccttctgggttcaagcgattctcctgcctcagcctcccgagtagctgggattacaggctcctgccaccacacccggctaatttttgtatttttagtggagacagggtttccaccatgttggccagcgtggtcttgaactcctgacctcaggtgattcaccagcctcggcctcccaaagtgctgggattacaggtgtgagccactgcacctggcctattattatttttaaattttttttttttaattgatcattcttgggtgtttctcacagagggtgatttggcagggtcacaggacaatagtggagggaaggtcagcagataaacaagtgaacaaaggtctctggttttcctaggcagaggaccctgcggccttccgcagtgtttgtgtccctgggtacttgagattagggagtggtgatgactcttaaggagcatgctgccttcaagcatctgtttaacaaagcacatcttgcactgcccttaatccatttaaccctgagtggacacagcacatgtttcagagagcacagggttgggggtaaggtcatagatcaacagcatcctaaggcagaagaatttttcttagtacagaacaaaatgaagtctcccatgtctacttctttctacacagacacagcaacaatctgatttctctatcttttccccacctttcccccttttctattccacaaaaccgccatcgtcatcatggcctgttctcaatgagctgttgggtacacctcccagacggggtggcggctgggcagaggggctcctcacttcccagatggggcggccaggcggacgcgccccccacctccctcccggacgggatagctggccgggcgggggctgaccccccacctccctccccgacggggcggctggccgggcgggggctgacccccacgcctccctcccggacggggcggctgccaggcggaggggctcctcacttctcagacggggtggctgctgggcggagacgctcctcacttcccagacagggtggctgtcgggcggaggggctcctcacttctcagacggggcagctgcgggcggaggggctcctcacttctcagacggggtggccgggcagagaagctcctcacatcccagacgggggggcggggcagaggcgctccccacatctcagacgatgggcggccgggcagagacgctcctcacttcatcccagacggggtggcggccgggcagaagctgtaatctcggcaccctggggggccaaggcaggcggctgggaggcggaggccgtagccagctgagatcacaccactgcactccagcctgggcaacattgagcactgagtggacgagactctgcccgcaatcccggcacctcgggaggccgaggctggcagatcactcgcagtcaggagctggagaccagcccggccaacacagtgaaaccctgtctccaccaaaaaaatacgaaaaccagtcaggcgtggcggcgcccgcaatggcaggcacgcggcaggccgaggcgggagaatcaggcagggaggctgcagtgagccgagatggcagcagtacagtccagcttcggctcggcatcagagggagaccgtggggagagggagaagagagggagggggagagggctatttttaaaattttttaaaattgctgaacaggggtacctctgggcagtgtgtcagaataccactttttaaatattttatgatttatttatttttctatttcttgaggttttaactgatgtgtatctgtatgtctatttgtgtatattttgtcatgatcatgtaacagagtctgaaaagtgtcgaagagacagttttcaggaacaacaagcaattattcctactttccaagttattttgatgccatggtggctcatacctataatctgagtactttgggaggctgaggtggactgatcacttgagcccaggagtttgagaccagcctgggcaacatagcaagactccatctctacaaaaaaagacaaaatttagctgagcgtggtggcgtgttcctgtagtcccagctacttgggaggctgaagtgagtggatcccctgagcccagagaggtcaaggttgtgatgagctgtgatcacaccactgcacttcagcatgggagacagagtgagaccctgtttcagaaaaaataaataaataaaaccaccagcaccacaaacaacaacaaaaagttattttgtacttgttttgagcacaggactcctgagggtatctttgcatttaatattacataggggtgccagtgggaagtaatgtgtatgcttggcctcatgagctaaaaccctgtgttaattatgacagaaggaaagtgtgtgagagagatcttaactacctagcagctctagctgccatcttgaaccatgaagatacgggccacacgtaggggtagctgggtagtgagcagcaagaagccttgttggatgagggcacgaaggagcagaatcactggaatcactgtgtcagccctaattacctacctctggacttttatgtgaggggaaaaaaaattgacagtttatatttatctcaacctagttaacccaagtgatgcattgttatgagattaaaatgtttggaggccgggtgcggtggctcacgcctataatcccagccctttgggaggccaaggcgggcggatcacgaggtcaggagatcaagaccatcctggctaacatgtaaaaccccgtctctactaaaaatacaaaaaattagccaggcgttgtggcggtcgcctgtagtccctgctatttgggaggccgaggcaagagaacggcatgaacctgggaggtggagcttgcagcgagctgagatcttgccactgcactccagcctgggcgacagtgcgagactctgtctcaaaaataaataaataaataaataataaataaaatgtttggaatgttggcttcatccctgggatgcaaggctggttcaacatacgcaaatcaagaaacataattcatcacataaacagaactaaagacaaaaaccacatgattatctcaatagatacagaaaaggccttcaataaaattcaacgttgcttcatgttaaaaactctcaataaactaggtattgatggaaaatatctcaaaataataaccatttatgacaaacccacagccattatcatactgaatgggcaaaagctggaagcattccccttgaaaactggcacaagacagggatgccgtctcaccactcctatttaacatagtattggaagttctggccaagaaaatcaggcaagagaaacaaataaggggtattcaaataggaaaagaggaagtaaaactgtgtttgcagatgacatgatactatatctagaaaaccccattatctccacccaaaagttccttaagctgataagcaacttcagcaaagtctcaggatacaaaatcaatgtgcagaaatcacaagcattctatacaccaacaatacacaagcagagagccaaatcatgaatgaactcccattcacagttgctagaaagagaataaaatacctaggaatacagctaataagatgtgaaggatctcttcaaggagaactacaaaccactgctcaaggaaataagagaggacacaaatgaaaaaacattccattctcgtggataggaagaatcaatatcatgaaaatggccatactacccaaagtaatttataggttcattgctattcccattaaactactattgacattcttcacagaattagaaaaaaactactttaaaattcaaatggaaccaaaaaagagcccgtataaccaagacaacaataagcaaaaagaacaaagctggaagcatcacactacccaacttcaaagtatactgcaaggctacagtagccaaaatggcatggtactggtacaaaaacagacacatagaccaatggaacagaatagagaccagagaaagaagaccacacatctacagccatctgatcatcgacaaacctgacaaaaacaagcaatggggaaaagattccctatttaataaatggtgctgggaaaactggctagccatatgcagaaaattgaaactgaccccttccttacaccttatacaaaaattaactcaagattaaagacttaatgtaaaacctaaaactataaaaaccctagaagaaaatctatttaataccattcaagacataggcacaagcaaaggtttcatgacaaaaacatcaaaagcaattgcaacaaaagcaaaaattacaaatgggatctaattaaactaaagagctcctgcacagcaaaagaaactatcattagagtgaacaggcaacctacagaatgggagaacatttttgcaatctatccatctgacaaaggtctaatatccagaacctacaaggaacttaaaacaaatttacaaggaaaaaaacaaccccatcaaaaagtggacaaaggacatgaacagacacttctcaaaagaagacatttatgtggccaacaaacatataaaaaaaagctcaaccttactgatcattagagaaatgcaaaggagaaccacaatgagataccatctcatgccggtcagaatggtgattattaaaaagtcaaaaaacaacagatgctggcgaggctgtggagaagtaggaacacttttacattgttggtgggaatgtaaattagttcaaccgttgtggaagtgtgtgtggctattcctcaaagatctagaactagaaatactatttgtcccagcaatcccattactgggtatatacccaaaggaatataaaccattttattataaagatacatgcacatttttgttcattgcagcactcttcacaatagcaaagacacaatagcaaatgcccatcaaagatagactggataaagaaaatgtggtacatatacaccatggaatactgtgcagtgcagccattacagcttttggtgatacagtgaatcagatttttcattaattcttttaattggttattactgaacgtgaaaaagtaatgtttgtattgaaatcttgagtctggccatgtttctattttaaattcataaagaattctaacaagaggaattccaagaatgtcataaatggatgtttctccatggatgaaggaactgttttattcacttgctgataattcagcctaatccagtttgacatcatatagataagtagttgaattatggatttaaaatacatatcattttctaactccaaaggtaatacttatttaaatggttttgaaaatatagaaaggcacaatttctttttaaatctgttattctccaccaccactcaatctgtctatcatctatctctccattcattcttccatttgtttatatctgttaatctttgtatgtgttcatgtatagcttttacatgattggaatcataatgcatattccattttgaagtctgcttttttttacacaaaaatatgttgtgaatattttcctatattatgaaatatcattagctgagcttttagaattgactgcatgttttggtaccatttagatatagtttaagatacttagaagttatgtggctttgccactatggatgaatcttatttactcaatattaattacttacaaataacctcacctaaacactactcagccataaaaaggaatgaattaatgacattcacagcaacctggagactattactctaaaggaagtaactgaggaatggaaaaccaaacattgtatgttctcactcataagtgggagataagctatgaggatgcaaaggcataagaaggatacaatggactttggggacttaggggaaagggtgggaggggggtgaaggataaaagaatacaaattgggttcagtgtatactgctcaggtgatgggtgcaccagaatctcacaagtaaccacttaattacttacgcatgtaaccagataccacctgttccccaaacacctatggaaataattttgtttttttttttaaaaaaggaatgagatcatgtcctttgcagggacatggatgaagctggaagccattatcctcagcaaactaacagaggagcaggaaaccaaacaccacatgttctcacttgtaagcggaagctgaacaatgagaacacacggacacagggatgagatcaacacacactggggcctgatgcaggggccgtagcggggagagcatcaggataactagctaatgcatgtggggcttaatacctaggtgataggttgataggtgcagcaaaccaccatgggacacgtttacctatgtaacaaacccgcacatcctgcacttgtatccagaacttaaaatattttaaaaatctttagagaatacaaaaaaaaaaaaaaagattcttcaatgcatacacaataaaattgcagttcagtcaaacattggaagtctttctctgactgtctagttggtatcttcattttcagcttcttcaagatcccactccaaacactgttagctcagccaaattgaacagctcatatctcctacctctggatctttggttctggtgattgtatatttctggaccatctggaaccccagcatatcaccctaccccacatctccacatccccaaaatataaccatacttcaagggcagttcaaataccatctccttctatcctccatgaagtcagttatctcttccattggaattatcgccccctctcctgaacagtactatttcgtgtgaatctcctccaagccttcttttcattttatatctcatgctgtaattcttggaaagtatgctgtagctcaagtgcagaattctcatcagttttatctttatatctctcctaaacactttacctgatgaagagcctggcatacacataaatatatattgaatgaatcagtgatggattgaaaagagaaatgatggatctcctaaattttaacttttataaaatattttgatacattcatgaccttactttagcaagcaatgaacgtgatgtaaactattgttgatatagtttttatattggaagtgtaagtagtttgtggcatgggattgtgacatatcctaggtttcctcatcttctttttattgaaatgtaattcacaagccataaaatttgcccctttaaagtaaatgatgcagtggattttagtatatttacagagttgtgcaatcatcaccactatctaattccagaacatttccatctacctagaaactccataccagtgagctgccactctaatcctcctcttcccccagcctctagaaacaataatccattttctgtctctatgatttgcctgttctagatattttataaaaataaacatgtggcctttcgtgtctgacttccttcacttaaaaaaaaaaaaaaaaaa

SEQ ID NO: 64 - protein, 480 aa, Homo sapiens
MSAEVIHQVEEALDTDEKEMLLFLCRDVAIDVVPPNVRDLLDILRERGKLSVGDLAELLYRVRRFDLLKRILKMDRKAVETHLLRNPHLVSDYRVLMAEIGEDLDKSDVSSLIFLMKDYMGRGKISKEKSFLDLVVELEKLNLVAPDQLDLLEKCLKNIHRIDLKTKIQKYKQSVQGAGTSYRNVLQAAIQKSLKDPSNNFRLHNGRSKEQRLKEQLGAQQEPVKKSIQESEAFLPQSIPEERYKMKSKPLGICLIIDCIGNETELLRDTFTSLGYEVQKFLHLSMHGISQILGQFACMPEHRDYDSFVCVLVSRGGSQSVYGVDQTHSGLPLHHIRRMFMGDSCPYLAGKPKMFFIQNYVVSEGQLEDSSLLEVDGPAMKNVEFKAQKRGLCTVHREADFFWSLCTADMSLLEQSHSSPSLYLQCLSQKLRQERKRPLLDLHIELNGYMYDWNSRVSAKEKYYVWLQHTLRKKLILSYT

SEQ ID NO: 65 - DNA, 822 bp, Homo sapiens
  CDS (56)..(517)
agttccctatcactctctttaatcactactcacagtaacctcaactcctgccacaatgtacaggatgcaactcctgtcttgcattgcactaagtcttgcacttgtcacaaacagtgcacctacttcaagttctacaaagaaaacacagctacaactggagcatttactgctggatttacagatgattttgaatggaattaataattacaagaatcccaaactcaccaggatgctcacatttaagttttacatgcccaagaaggccacagaactgaaacatcttcagtgtctagaagaagaactcaaacctctggaggaagtgctaaatttagctcaaagcaaaaactttcacttaagacccagggacttaatcagcaatatcaacgtaatagttctggaactaaagggatctgaaacaacattcatgtgtgaatatgctgatgagacagcaaccattgtagaatttctgaacagatggattaccttttgtcaaagcatcatctcaacactgacttgataattaagtgcttcccacttaaaacatatcaggccttctatttatttaaatatttaaattttatatttattgttgaatgtatggtttgctacctattgtaactattattcttaatcttaaaactataaatatggatcttttatgattctttttgtaagccctaggggctctaaaatggtttcacttatttatcccaaaatatttattattatgttgaatgttaaatatagtatctatgtagattggttagtaaaactatttaataaatttgataaatataaaaaaaaaaaaaaaaaaaaaaaaaa

SEQ ID NO: 66 - protein, 153 aa, Homo sapiens
MYRMQLLSCIALSLALVTNSAPTSSSTKKTQLQLEHLLLDLQMILNGINNYKNPKLTRMLTFKFYMPKKATELKHLQCLEEELKPLEEVLNLAQSKNFHLRPRDLISNINVIVLELKGSETTFMCEYADETATIVEFLNRWITFCQSIISTLT

SEQ ID NO: 67 - DNA, 5046 bp, Homo sapiens
  CDS (259)..(2733)
cgaggctccgtgccccgccccccgggtgccccgcccctttgcgcggctggcgcggccagcaggccaggctcccctcggcaaacctgtctaattggggcggggagcggagcttcctcctctgagggccgtgccgcgctgccagatttgttcttccgcccctgcctccgcggctcggaggcgagcggaaggtgccccggggccgaggcccgtgacggggcgggcgggagccccggcagtccggggtcgccggcgagggccatgtcgctgttgggggacccgctacaggccctgccgccctcggccgcccccacggggccgctgctcgcccctccggccggcgcgaccctcaaccgcctgcgggagccgctgctgcggaggctcagcgagctcctggatcaggcgcccgagggccggggctggaggagactggcggagctggcggggagtcgcgggcgcctccgcctcagttgcctagacctggagcagtgttctcttaaggtactggagcctgaaggaagccccagcctgtgtctgctgaagttaatgggtgaaaaaggttgcacagtcacagaattgagtgatttcctgcaggctatggaacacactgaagttcttcagcttctcagccccccaggaataaagattactgtaaacccagagtcaaaggcagtcttggctggacagtttgtgaaactgtgttgccgggcaactggacatccttttgttcaatatcagtggttcaaaatgaataaagagattccaaatggaaatacatcagagcttatttttaatgcagtgcatgtaaaagatgcaggcttttatgtctgtcgagttaataacaatttcacctttgaattcagccagtggtcacagctggatgtttgcgacatcccagagagcttccagagaagtgttgatggcgtctctgaatccaagttgcaaatctgtgttgaaccaacttcccaaaagctgatgccaggcagcacattggttttacagtgtgttgctgttggaagccctattcctcactaccagtggttcaaaaatgaattaccattaacacatgagaccaaaaagctatacatggtgccttatgtggatttggaacaccaaggaacctactggtgtcatgtatataatgatcgagacagtcaagatagcaagaaggtagaaatcatcataggaagaacagatgaggcagtggagtgcactgaagatgaattaaataatcttggtcatcctgataataaagagcaaacaactgaccagcctttggcgaaggacaaggttgcccttttgataggaaatatgaattaccgggagcaccccaagctcaaagctcctttggtggatgtgtacgaattgactaacttactgagacagctggacttcaaagtggtttcactgttggatcttactgaatatgagatgcgtaatgctgtggatgagtttttactccttttagacaagggagtatatgggttattatattatgcaggacatggttatgaaaattttgggaacagcttcatggtccccgttgatgctccaaatccatataggtctgaaaattgtctgtgtgtacaaaatatactgaaattgatgcaagaaaaagaaactggacttaatgtgttcttattggatatgtgtaggaaaagaaatgactacgatgataccattccaatcttggatgcactaaaagtcaccgccaatattgtgtttggatatgccacgtgtcaaggagcagaagcttttgaaatccagcattctggattggcaaatggaatctttatgaaatttttaaaagacagattattagaagataagaaaatcactgtgttactggatgaagttgcagaagatatgggtaagtgtcaccttaccaaaggcaaacaggctctagagattcgaagtagtttatctgagaagagagcacttactgatccaatacagggaacagaatattctgctgaatctcttgtgcggaatctacagtgggccaaggctcatgaacttccagaaagtatgtgtcttaagtttgactgtggtgttcagattcaattaggatttgcagctgagttttccaatgtcatgatcatctatacaagtatagtttacaaaccaccggagataataatgtgtgatgcctacgttactgattttccacttgatctagatattgatccaaaagatgcaaataaaggcacacctgaagaaactggcagctacttggtatcaaaggatcttcccaagcattgcctctataccagactcagttcactgcaaaaattaaaggaacatctagtcttcacagtatgtttatcatatcagtactcaggattggaagatactgtagaggacaagcaggaagtgaatgttgggaaacctctcattgctaaattagacatgcatcgaggtttgggaaggaagacttgctttcaaacttgtcttatgtctaatggtccttaccagagttctgcagccacctcaggaggagcagggcattatcactcattgcaagacccattccatggtgtttaccattcacatcctggtaatccaagtaatgttacaccagcagatagctgtcattgcagccggactccagatgcatttatttcaagtttcgctcaccatgcttcatgtcattttagtagaagtaatgtgccagtagagacaactgatgaaataccatttagtttctctgacaggctcagaatttctgaaaaatgacctccttgtttttgaaagttagcataattttagatgcctgtgaaatagtactgcacttacataaagtgagacattgtgaaaaggcaaatttgtatatgtagagaaagaatagtagtaactgtttcatagcaaacttcaggactttgagatgttgaaattacattatttaattacagacttcctctttctaagattttgtgaattggttgaatagttctatacaaatgaagtatggaggtgtgtatgtttatatgtatataacaaaatattttcattgtgaccactctgaagtaagagcaatgggaatggcattattgtagaataagtcattgtatttttaacaccagaaagaaccttgccgatcaccaggcataacctaattttatccatggaagaaacacagaaaggcatctaagttagagctggcaccagaactgagacctccagaaatctattccagtattttttccactacacaactgccttcctgacaggttctgagataagtgttatgtttgtagatagagtgaaatatatttatatatatataaatatatacagatacatatctgtgtattatctcaaggaatgtacaaactttagtttttgattataaggacttcactgcaagttttagttaagaggtttgtatataaatctgttatagaacaggctgaaatttcttgttcataagattatgaaaccacatgagaagtgataaaatgtttgttaaagctagatagaggttaagaatcaagatataatggataattttcatagctgcctatcagaatttcccaaatatttagcatcttccttgataatatgtattttcttcttgaatttcactggcctaatgagataatactcttatctttggctctacctaaaagttggttaaaaatgcaattggcattaacaaggaaaaatactgaattagtaattttaaaagtctcacaaagaaaatcccaggcctagatggctgcattgttgaattctgccaaacattaaaattagcactaattttttgcacactgtttctaaaagtaggagaggaaagaacacttcccaacttactctaggtcagtattaccctgatactagactagacatcacaagaaaactataagccaatattccttattaatacaaacacaaaaatcattaacaaaaatattagcaaactgaatccagcaacctataaaaaggattctatatcatgaccaagtggaatttatcccaggaattcaaggttggttcaacatctaaaaatcaaataagctaatatacagtcagttctcattattcacagtaattatgttctacagaatattctcccataaacactgaattaaatatggaacaactgcttttaggagaaagtgtatttgtgtatatgtgtgtatacatatgtttatctcacacacattatgagcttgaattcttaattcatcctagcaaattctaccttattttacagaagtgaaagtgaggtatcagaagtgttaagtgacatgcctgaggcacccccctaacaggtgtcagagctgaaattcaaaccccatccagctggccccggagccagagcttcttgtactacacagaattgcccctgccatttccaccctccagtcatttctctatgagactgaagcaggaaggcagagcatcatcttgttcagcctcagctgggaacatgtgtactgggtgactcaaatttttcacccatttacacatatccacaaatgactgcaaaagtgccacggatatcaatttgagggttataaattttagcaagttggtaaattcacaaatacataaccttgaataatgaggatcaactgtaccatatttaataaagcacaaaacccacacagattgtcttattacagcatttgataaaatccaaaactctttcataaaaacactcaacaaacttaggaataaaaggaatcttcctagatatgataaatataacatctatgaaaagcccacacctaacattatacttcatggtgatagactgaaggctgaatgttttccccttaagattgggaagaaggacaaggatgttcactcggcactacttctattcagcattgtacttgaagttctagccacagcagttaggttaggaattcaaggtttgttcaacatctaaaaatcaaataagctaataaagaaaagaggtttatactgcaaaagaagtgaaactatatgtattcacagttgatacatagttgtatatagaaaatgctaaagaatccataaaaagtaataaatgagttcaacaggttaaaaaaaaaaaaaaaa

SEQ ID NO: 68 - protein, 824 aa, Homo sapiens
MSLLGDPLQALPPSAAPTGPLLAPPAGATLNRLREPLLRRLSELLDQAPEGRGWRRLAELAGSRGRLRLSCLDLEQCSLKVLEPEGSPSLCLLKLMGEKGCTVTELSDFLQAMEHTEVLQLLSPPGIKITVNPESKAVLAGQFVKLCCRATGHPFVQYQWFKMNKEIPNGNTSELIFNAVHVKDAGFYVCRVNNNFTFEFSQWSQLDVCDIPESFQRSVDGVSESKLQICVEPTSQKLMPGSTLVLQCVAVGSPIPHYQWFKNELPLTHETKKLYMVPYVDLEHQGTYWCHVYNDRDSQDSKKVEIIIGRTDEAVECTEDELNNLGHPDNKEQTTDQPLAKDKVALLIGNMNYREHPKLKAPLVDVYELTNLLRQLDFKVVSLLDLTEYEMRNAVDEFLLLLDKGVYGLLYYAGHGYENFGNSFMVPVDAPNPYRSENCLCVQNILKLMQEKETGLNVFLLDMCRKRNDYDDTIPILDALKVTANIVFGYATCQGAEAFEIQHSGLANGIFMKFLKDRLLEDKKITVLLDEVAEDMGKCHLTKGKQALEIRSSLSEKRALTDPIQGTEYSAESLVRNLQWAKAHELPESMCLKFDCGVQIQLGFAAEFSNVMIIYTSIVYKPPEIIMCDAYVTDFPLDLDIDPKDANKGTPEETGSYLVSKDLPKHCLYTRLSSLQKLKEHLVFTVCLSYQYSGLEDTVEDKQEVNVGKPLIAKLDMHRGLGRKTCFQTCLMSNGPYQSSAATSGGAGHYHSLQDPFHGVYHSHPGNPSNVTPADSCHCSRTPDAFISSFAHHASCHFSRSNVPVETTDEIPFSFSDRLRISEK

SEQ ID NO: 69 - DNA, 4107 bp, Homo sapiens
  CDS (209)..(1261)
gcgcaaccctccggaagctgccgcccctttccccttttatgggaatactttttttaaaaaaaaagagttcgctggcgccaccccgtaggactggccgccctaaaaccgtgataaaggagctgctcgccacttctcacttccgcttccttccagtaaggagtcggggtcttccccagttttctcagccaggcggcggcggcgactggcaatgtttggcctcaaaagaaacgcggtaatcggactcaacctctactgtgggggggccggcttgggggccggcagcggcggcgccacccgcccgggagggcgacttttggctacggagaaggaggcctcggcccggcgagagatagggggaggggaggccggcgcggtgattggcggaagcgccggcgcaagccccccgtccaccctcacgccagactcccggagggtcgcgcggccgccgcccattggcgccgaggtccccgacgtcaccgcgacccccgcgaggctgcttttcttcgcgcccacccgccgcgcggcgccgcttgaggagatggaagccccggccgctgacgccatcatgtcgcccgaagaggagctggacgggtacgagccggagcctctcgggaagcggccggctgtcctgccgctgctggagttggtcggggaatctggtaataacaccagtacggacgggtcactaccctcgacgccgccgccagcagaggaggaggaggacgagttgtaccggcagtcgctggagattatctctcggtaccttcgggagcaggccaccggcgccaaggacacaaagccaatgggcaggtctggggccaccagcaggaaggcgctggagaccttacgacgggttggggatggcgtgcagcgcaaccacgagacggccttccaaggcatgcttcggaaactggacatcaaaaacgaagacgatgtgaaatcgttgtctcgagtgatgatccatgttttcagcgacggcgtaacaaactggggcaggattgtgactctcatttcttttggtgcctttgtggctaaacacttgaagaccataaaccaagaaagctgcatcgaaccattagcagaaagtatcacagacgttctcgtaaggacaaaacgggactggctagttaaacaaagaggctgggatgggtttgtggagttcttccatgtagaggacctagaaggtggcatcaggaatgtgctgctggcttttgcaggtgttgctggagtaggagctggtttggcatatctaataagatagccttactgtaagtgcaatagttgacttttaaccaaccaccaccaccaccaaaaccagtttatgcagttggactccaagctgtaacttcctagagttgcaccctagcaacctagccagaaaagcaagtggcaagaggattatggctaacaagaataaatacatgggaagagtgctccccattgattgaagagtcactgtctgaaagaagcaaagttcagtttcagcaacaaacaaactttgtttgggaagctatggaggaggacttttagatttagtgaagatggtagggtggaaagacttaatttccttgttgagaacaggaaagtggccagtagccaggcaagtcatagaattgattacccgccgaattcattaatttactgtagtgttaagagaagcactaagaatgccagtgacctgtgtaaaagttacaagtaatagaactatgactgtaagcctcagtactgtacaagggaagcttttcctctctctaattagctttcccagtatacttcttagaaagtccaagtgttcaggacttttatacctgttatactttggcttggtttccatgattcttactttattagcctagtttatcaccaataatacttgacggaaggctcagtaattagttatgaatatggatatcctcaattcttaagacagcttgtaaatgtatttgtaaaaattgtatatatttttacagaaagtctatttctttgaaacgaaggaagtatcgaatttacattagtttttttcatacccttttgaactttgcaacttccgtaattaggaacctgtttcttacagcttttctatgctaaactttgttctgttcagttctagagtgtatacagaacgaattgatgtgtaactgtatgcagactggttgtagtggaacaaatctgataactatgcaggtttaaattttcttatctgattttggtaagtattccttagataggtttttctttgaaaacctgggattgagaggttgatgaatggaaattctttcacttcattatatgcaagttttcaataattaggtctaagtggagttttaaggttactgatgacttacaaataatgggctctgattgggcaatactcatttgagttccttccatttgacctaatttaactggtgaaatttaaagtgaattcatgggctcatctttaaagcttttactaaaagattttcagctgaatggaactcattagctgtgtgcatataaaaagatcacatcaggtggatggagagacatttgatcccttgtttgcttaataaattataaaatgatggcttggaaaagcaggctagtctaaccatggtgctattattaggcttgcttgttacacacacaggtctaagcctagtatgtcaataaagcaaatacttactgttttgtttctattaatgattcccaaaccttgttgcaagtttttgcattggcatctttggatttcagtcttgatgtttgttctatcagacttaaccttttatttcctgtccttccttgaaattgctgattgttctgctccctctacagatatttatatcaattcctacagctttcccctgccatccctgaactctttctagcccttttagattttggcactgtgaaacccctgctggaaacctgagtgaccctccctccccaccaagagtccacagacctttcatctttcacgaacttgatcctgttagcaggtggtaataccatgggtgctgtgacactaacagtcattgagaggtgggaggaagtcccttttccttggactggtatcttttcaactattgttttatcctgtctttgggggcaatgtgtcaaaagtcccctcaggaattttcagaggaaagaacattttatgaggctttctctaaagtttcctttgtataggagtatgctcacttaaatttacagaaagaggtgagctgtgttaaacctcagagtttaaaagctactgataaactgaagaaagtgtctatattggaactagggtcatttgaaagcttcagtctcggaacatgacctttagtctgtggactccatttaaaaataggtatgaataagatgactaagaatgtaatggggaagaactgccctgcctgcccatctcagagccataaggtcatctttgctagagctatttttacctatgtatttatcgttcttgatcataagccgcttatttatatcatgtatctctaaggacctaaaagcactttatgtagtttttaattaatcttaagatctggttacggtaactaaaaaagcctgtctgccaaatccagtggaaacaagtgcatagatgtgaattggtttttaggggccccacttcccaattcattaggtatgactgtggaaatacagacaaggatcttagttgatattttgggcttggggcagtgagggcttaggacaccccaagtggtttgggaaaggaggaggggagtggtgggtttatagggggaggaggaggcaggtggtctaagtgctgactggctacgtagttcgggcaaatcctccaaaagggaaagggaggatttgcttagaaggatggcgctcccagtgactactttttgacttctgtttgtcttacgcttctctcagggaaaaacatgcagtcctctagtgtttcatgtacattctgtggggggtgaacaccttggttctggttaaacagctgtacttttgatagctgtgccaggaagggttaggaccaactacaaattaatgttggttgtcaaatgtagtgtgtttccctaactttctgtttttcctgagaaaaaaaaataaatcttttattcaaatacagggaaaaaaaaaaaaaaaaaa

SEQ ID NO: 70 - protein, 350 aa, Homo sapiens
MFGLKRNAVIGLNLYCGGAGLGAGSGGATRPGGRLLATEKEASARREIGGGEAGAVIGGSAGASPPSTLTPDSRRVARPPPIGAEVPDVTATPARLLFFAPTRRAAPLEEMEAPAADAIMSPEEELDGYEPEPLGKRPAVLPLLELVGESGNNTSTDGSLPSTPPPAEEEEDELYRQSLEIISRYLREQATGAKDTKPMGRSGATSRKALETLRRVGDGVQRNHETAFQGMLRKLDIKNEDDVKSLSRVMIHVFSDGVTNWGRIVTLISFGAFVAKHLKTINQESCIEPLAESITDVLVRTKRDWLVKQRGWDGFVEFFHVEDLEGGIRNVLLAFAGVAGVGAGLAYLIR

SEQ ID NO: 71 - DNA, 4560 bp, Homo sapiens
  CDS (626)..(3022)
gggcccgcagcttccgtggctgagaggagccggcggcggcagtgtctgtggtggccgcggcggcgagagcgacggtcccatctttcccaccctcttggttgccgctggccacacgccctccgctggcggcgacttctcagctccgtgcgcccgggctggacagtgagcctcgagaggagacgcgggcggctagagccggagtggggcgagccgcggaacccggccgggagccgcgcgaggcgtgatcggagggtatggttggcatggaattgaatttcatctgtctgtgggaattgtaagcaagattgccatcacgaaagccaaagtggatttctccagtgtggtgtgcctgcccccttccgtcattgctgtgaatgggctggacggaggaggggccggcgaaaatgatgatgaaccagtgctcgtgtccttatctgcggcacccagtccccagagtgaagctgttgccaatgaactgcaggagctctccttgcagcccgagctgaccctaggcctccaccctggcaggaatcccaatttgcctccacttagtgagcggaagaatgtgctacagttgaaactccagcagcgccggacccgggaagaactggtgagccaagggatcatgccgcctttgaaaagtccagccgcatttcatgagcagagaaggagcttggagcgggccaggacagaggactatctcaaacggaagattcgttcccggccggagagatcggagctggtcaggatgcacattttggaagagacctcggctgagccatccctccaggccaagcagctgaagctgaagagagccagactagccgatgacctcaatgagaagattgcacagaggcctggccccatggagctggtggagaagaacatccttcctgttgagtccagcctgaaggaagccatcattgtgggccaggtgaactatcccaaagtagcagacagctcttccttcgatgaggacagcagcgatgccttatcccccgagcagcctgccagccatgagtcccagggttctgtgccgtcacccctggaggcccgagtcagcgaaccactgctcagtgccacctctgcatcccccacccaggttgtgtctcaacttccgatgggccgggattccagagaaatgcttttcctggcagagcagcctcctctgcctcccccacctctgctgcctcccagcctcaccaatggaaccactatccccactgccaagtccacccccacactcattaagcaaagccaacccaagtctgccagtgagaagtcacagcgcagcaagaaggccaaggagctgaagccaaaggtgaagaagctcaagtaccaccagtacatccccccggaccagaagcaggacaggggggcaccccccatggactcatcctacgccaagatcctgcagcagcagcagctcttcctccagctgcagatcctcaaccagcagcagcagcagcaccacaactaccaggccatcctgcctgccccgccaaagtcagcaggcgaggccctgggaagcagcgggacccccccagtacgcagcctctccactaccaatagcagctccagctcgggcgcccctgggccctgtgggctggcacgtcagaacagcacctcactgactggcaagccgggagccctgccggccaacctggacgacatgaaggtggcagagctgaagcaggagctgaagttgcgatcactgcctgtctcgggcaccaaaactgagctgattgagcgccttcgagcctatcaagaccaaatcagccctgtgccaggagcccccaaggcccctgccgccacctctatcctgcacaaggctggcgaggtggtggtagccttcccagcggcccggctgagcacggggccagccctggtggcagcaggcctggctccagctgaggtggtggtggccacggtggccagcagtggggtggtgaagtttggcagcacgggctccacgccccccgtgtctcccaccccctcggagcgctcactgctcagcacgggcgatgaaaactccacccccggggacacctttggtgagatggtgacatcacctctgacgcagctgaccctgcaggcctcgccactgcagatcctcgtgaaggaggagggcccccgggccgggtcctgttgcctgagccctggggggcgggcggagctagaggggcgcgacaaggaccagatgctgcaggagaaagacaagcagatcgaggcgctgacgcgcatgctccggcagaagcagcagctggtggagcggctcaagctgcagctggagcaggagaagcgagcccagcagcccgcccccgcccccgcccccctcggcacccccgtgaagcaggagaacagcttctccagctgccagctgagccagcagcccctgggccccgctcacccattcaaccccagcctggcggccccagccaccaaccacatagacccttgtgctgtggccccggggcccccgtccgtggtggtgaagcaggaagccttgcagcctgagcccgagccggtccccgccccccagttgcttctggggcctcagggccccagcctcatcaagggggttgcacctcccaccctcatcaccgactccacagggacccaccttgtcctcaccgtgaccaataagaatgcagacagccctggcctgtccagtgggagcccccagcagccctcgtcccagcctggctctccagcgcctgccccctctgcccagatggacctggagcacccactgcagcccctctttgggacccccacttctctgctgaagaaggaaccacctggctatgaggaagccatgagccagcagcccaaacagcaggaaaatggttcctcaagccagcagatggacgacctgtttgacattctcattcagagcggaggtaaccccagaaatttcagcagatttcaaggagccgccatccctgccagggaaggagaagccatccccgaagacagtctgtgggtcccccctggcagcacagccatcaccttctgctgagctcccccaggctgccccacctcctccaggctcaccctccctccctggacgcctggaggacttcctggagagcagcacggggctgcccctgctgaccagtgggcatgacgggccagagcccctttccctcattgacgacctccatagccagatgctgagcagcactgccatcctggaccaccccccgtcacccatggacacctcggaattgcactttgttcctgagcccagcagcaccatgggcctggacctggctgatggccacctggacagcatggactggctggagctgtcgtcaggtggtcccgtgctgagcctagcccccctcagcaccacagcccccagcctcttctccacagacttcctcgatggccatgatttgcagctgcactgggattcctgcttgtagctctctggctcaagacggggtggggaaggggctgggagccagggtactccaatgcgtggctctcctgcgtgattcggcctctccacatggttgtgagtcttgacaatcacagcccctgctttttcccttccctgggaggctagaacagagaagcccttactcctggttcagtgccacgcagggcagaggagagcagctgtcaagaagcagccctggctctcacgctggggttttggacacacggtcagggtcagggccatttcagcttgacctccttttttgaggtcagggggcactgtctgtctggctacaatttggctaaggtaggtgaagcctggccaggcgggaggcttctcttctgacccagggctgagacaggttaaggggtgaatctccttcctttctctccctgctttgctgtgaagggagaaattagcctgggcctctaccccctattccctgtgtctgccaaccccaggatcccagggctccctgccattttagtgtcttggtgtagtgtaaccatttagtggttggtggcaacaattttatgtacaggtgtatatacctctatattatatatcgacatacatatatatttttgggggggggcggacaggagatgggtgcaactccctcccatcctactctcacagaagggcctggatgcaaggttacccttgagctgtgtgccacagtctggtgcccagtctggcatgcagctacccaggcccacccatcacgtgtgattgacatgtaggtaccctgccacggcctatgccccacctgccctgcttcctggctccttatcagtgccatgagggcagaggtgctacctggccttcctgccaggagctctccacccactcacattccgtccccgccgcctcactgcagccagcgtggccctaggacaggaggagcttcgggcccagcttcaccctgcggtggggctgaggggtggccatctcctgccctggggccactggcttcacattctgggctgactcataggggagtaggggtggagtcaccaaaaccagtgctgggacaaagatggggaaggtgtgtgaactttttaaaataaacacaaaaacacaggcctgttaaaaaaaaaaaaaaaaaaaaa

SEQ ID NO: 72 - protein, 798 aa, Homo sapiens
MPPLKSPAAFHEQRRSLERARTEDYLKRKIRSRPERSELVRMHILEETSAEPSLQAKQLKLKRARLADDLNEKIAQRPGPMELVEKNILPVESSLKEAIIVGQVNYPKVADSSSFDEDSSDALSPEQPASHESQGSVPSPLEARVSEPLLSATSASPTQVVSQLPMGRDSREMLFLAEQPPLPPPPLLPPSLTNGTTIPTAKSTPTLIKQSQPKSASEKSQRSKKAKELKPKVKKLKYHQYIPPDQKQDRGAPPMDSSYAKILQQQQLFLQLQILNQQQQQHHNYQAILPAPPKSAGEALGSSGTPPVRSLSTTNSSSSSGAPGPCGLARQNSTSLTGKPGALPANLDDMKVAELKQELKLRSLPVSGTKTELIERLRAYQDQISPVPGAPKAPAATSILHKAGEVVVAFPAARLSTGPALVAAGLAPAEVVVATVASSGVVKFGSTGSTPPVSPTPSERSLLSTGDENSTPGDTFGEMVTSPLTQLTLQASPLQILVKEEGPRAGSCCLSPGGRAELEGRDKDQMLQEKDKQIEALTRMLRQKQQLVERLKLQLEQEKRAQQPAPAPAPLGTPVKQENSFSSCQLSQQPLGPAHPFNPSLAAPATNHIDPCAVAPGPPSVVVKQEALQPEPEPVPAPQLLLGPQGPSLIKGVAPPTLITDSTGTHLVLTVTNKNADSPGLSSGSPQQPSSQPGSPAPAPSAQMDLEHPLQPLFGTPTSLLKKEPPGYEEAMSQQPKQQENGSSSQQMDDLFDILIQSGGNPRNFSRFQGAAIPAREGEAIPEDSLWVPPGSTAITFC

SEQ ID NO: 73 - DNA, 3215 bp, Homo sapiens
  CDS (178)..(2415)
gacaatatcaggtgagctgtggaggtggggtccttggaagctggatgacagcagctggcaaggggataagagagcagtgagcccctccctcaaggaggtctggctttatccatagacagggccctctgaggtggggctgaggtacaaagggggattgagcagcccaggagaagagagatgggggttcccttcttctcttctctcagatgcatggtggacttaggaccttgctgggctgggggtctcactgcagagatgaagctgcttctggccctagcagggctcctggccattctggccacgccccagccctctgaaggtgctgctccagctgtcctgggggaggtggacacctcgttggtgctgagctccatggaggaggccaagcagctggtggacaaggcctacaaggagcggcgggaaagcatcaagcagcggcttcgcagcggctcagccagccccatggaactcctatcctacttcaagcagccggtggcagccaccaggacggcggtgagggccgctgactacctgcacgtggctctagacctgctggagaggaagctgcggtccctgtggcgaaggccattcaatgtcactgatgtgctgacgcccgcccagctgaatgtgttgtccaagtcaagcggctgcgcctaccaggacgtgggggtgacttgcccggagcaggacaaataccgcaccatcaccgggatgtgcaacaacagacgcagccccacgctgggggcctccaaccgtgcctttgtgcgctggctgccggcggagtatgaggacggcttctctcttccctacggctggacgcccggggtcaagcgcaacggcttcccggtggctctggctcgcgcggtctccaacgagatcgtgcgcttccccactgatcagctgactccggaccaggagcgctcactcatgttcatgcaatggggccagctgttggaccacgacctcgacttcacccctgagccggccgcccgggcctccttcgtcactggcgtcaactgcgagaccagctgcgttcagcagccgccctgcttcccgctcaagatcccgcccaatgacccccgcatcaagaaccaagccgactgcatcccgttcttccgctcctgcccggcttgccccgggagcaacatcaccatccgcaaccagatcaacgcgctcacttccttcgtggacgccagcatggtgtacggcagcgaggagcccctggccaggaacctgcgcaacatgtccaaccagctggggctgctggccgtcaaccagcgcttccaagacaacggccgggccctgctgccctttgacaacctgcacgatgacccctgtctcctcaccaaccgctcagcgcgcatcccctgcttcctggcaggggacacccgttccagtgagatgcccgagctcacctccatgcacaccctcttacttcgggagcacaaccggctggccacagagctcaagagcctgaaccctaggtgggatggggagaggctctaccaggaagcccggaagatcgtgggggccatggtccagatcatcacttaccgggactacctgcccctggtgctggggccaacggccatgaggaagtacctgcccacgtaccgttcctacaatgactcagtggacccacgcatcgccaacgtcttcaccaatgccttccgctacggccacaccctcatccaacccttcatgttccgcctggacaatcggtaccagcccatggaacccaacccccgtgtccccctcagcagggtcttttttgcctcctggagggtcgtgctggaaggtggcattgaccccatcctccggggcctcatggccacccctgccaagctgaatcgtcagaaccaaattgcagtggatgagatccgggagcgattgtttgagcaggtcatgaggattgggctggacctgcctgctctgaacatgcagcgcagcagggaccacggcctcccaggatacaatgcctggaggcgcttctgtgggctcccgcagcctgaaactgtgggccagctgggcacggtgctgaggaacctgaaattggcgaggaaactgatggagcagtatggcacgcccaacaacatcgacatctggatgggcggcgtgtccgagcctctgaagcgcaaaggccgcgtgggcccactcctcgcctgcatcatcggtacccagttcaggaagctccgggatggtgatcggttttggtgggagaacgagggtgtgttcagcatgcagcagcgacaggccctggcccagatctcattgccccggatcatctgcgacaacacaggcatcaccaccgtgtctaagaacaacatcttcatgtccaactcatatccccgggactttgtcaactgcagtacacttcctgcattgaacctggcttcctggagggaagcctcctagaggccaggtaagggggtgcagcagtgaggggtatatctgggctggccagttggaaccacggagatctccttgccctagatgagcccagccctgttctgggtgcagctgagaaaatgagtgactagacgttcatttgtgtgctcatgtatgtgcgaagtatataaattggcttttcatgcgtgtgtgttgtctgaacatggggagtgtttcatgggttatgtgtatgtgccatttatgtgagtgtgtgtttgtgctgatgagaatactgagtatgtggaaggcagcagagcggactggtgaggagcacagctcaggaactagactgcctgggttccaatcctggctctgtggcttgctagctatgtgaccttgagcaaattaccctccttaaacaagagttttcttccttgtaaattacatctgtcatggtttcttggagggcccacttgtatcctctggttcttcatttattgagcacctactacatgcaaggcactgtactaggcgtgagaagcatatagaggcaagaaagagataccaagatgccatctgtgtcctggttagcagagctggaccagtggtgccttggagggataagccagctgcagctgggctgtgtggttgacttatgggcccagccagccaggctcaggccatggctcccctttttcttcctcaccctgatttcttgcttattcactgaagttctcctgaagaggaactgggcctgttgccctttctgtaccatttatttgctcccaatgtttatgataataaaggcaccgctgatggggacctcc

SEQ ID NO: 74 - protein, 745 aa, Homo sapiens
MGVPFFSSLRCMVDLGPCWAGGLTAEMKLLLALAGLLAILATPQPSEGAAPAVLGEVDTSLVLSSMEEAKQLVDKAYKERRESIKQRLRSGSASPMELLSYFKQPVAATRTAVRAADYLHVALDLLERKLRSLWRRPFNVTDVLTPAQLNVLSKSSGCAYQDVGVTCPEQDKYRTITGMCNNRRSPTLGASNRAFVRWLPAEYEDGFSLPYGWTPGVKRNGFPVALARAVSNEIVRFPTDQLTPDQERSLMFMQWGQLLDHDLDFTPEPAARASFVTGVNCETSCVQQPPCFPLKIPPNDPRIKNQADCIPFFRSCPACPGSNITIRNQINALTSFVDASMVYGSEEPLARNLRNMSNQLGLLAVNQRFQDNGRALLPFDNLHDDPCLLTNRSARIPCFLAGDTRSSEMPELTSMHTLLLREHNRLATELKSLNPRWDGERLYQEARKIVGAMVQIITYRDYLPLVLGPTAMRKYLPTYRSYNDSVDPRIANVFTNAFRYGHTLIQPFMFRLDNRYQPMEPNPRVPLSRVFFASWRVVLEGGIDPILRGLMATPAKLNRQNQIAVDEIRERLFEQVMRIGLDLPALNMQRSRDHGLPGYNAWRRFCGLPQPETVGQLGTVLRNLKLARKLMEQYGTPNNIDIWMGGVSEPLKRKGRVGPLLACIIGTQFRKLRDGDRFWWENEGVFSMQQRQALAQISLPRIICDNTGITTVSKNNIFMSNSYPRDFVNCSTLPALNLASWREAS

SEQ ID NO: 75 - DNA, 2535 bp, Homo sapiens
  CDS (141)..(1667)
acccttcccccttctccaaccgccaacggccgcctgcgcctgaggcccggcccacgccccatcccgctcgctccacgctgcggcagccccggcggccccaggtgcgcggcccccgccatcccgccccgccgccctgcgccatggaggagggccctctgccgggcgggctgcccagccccgaggatgcgatggtgacggagctcttaagccccgagggtccgttcgcttcggagaacatcggcctgaaggcccccgtgaagtacgaggaggacgagttccacgtcttcaaagaagcgtacctgggcccggcggaccccaaggaacccgtcctgcacgcgttcaaccccgcgctgggcgccgactgcaagggccaggtcaaggcgaagctcgcggggggcgacagcgacggcggggagctcctcggggagtaccccgggatcccagagctcagcgcgctggaggacgtcgcgctcctgcaggccccgcagccgcccgcctgcaacgtgcacttcctgtcctcgctgctacccgcgcaccgcagcccggcggtgttgcccctgggcgcctgggtcctggaaggagcctcccacccgggcgtccgcatgatcccagttgaaatcaaggaagcaggtggtactactacaagtaataatccggaagaagcaactttgcagaatcttcttgctcaggaatcctgttgcaagttcccatcgtcccaggaactagaggatgcctcctgctgttctcttaagaaagattccaacccaatggtgatatgccaattgaaagggggcacacaaatgctatgtatagacaattctagaacaagagaactaaaagcactccatttggttcctcagtatcaagatcaaaataattatctacagtcagatgtccctaaaccaatgactgctttagtagggagatttttgccagcatcaacaaaattaaatctcattacacaacaacttgagggagccttaccatcggtagtcaacgggtctgctttcccctcgggatcaactcttccaggaccaccaaaaataactttggctgggtactgtgactgctttgccagtggggacttttgcaacaactgcaattgtaataattgttgcaacaacttgcatcatgatattgaacggtttaaagccattaaggcatgtcttggtagaaatccagaagctttccagccaaaaattgggaagggccaattgggcaatgtcaagccccagcacaacaaagggtgcaactgcaggaggtcaggctgcctgaagaattactgcgagtgctatgaggcccaaattatgtgttcttctatttgcaaatgcattggttgcaaaaattatgaagaaagcccagaacgaaagacactaatgagcatgccaaactacatgcagactggaggtttggaaggcagccattacctgccaccaacgaaattttcaggacttccaagattcagtcacgataggcggccttcctcatgcatctcctgggaggtggtggaggccacatgcgcctgcctgcttgctcagggagaagaggccgagaaagaacactgctccaagtgcctggcagagcagatgatcctggaggaatttggaaggtgcttatcacagattctccacactgagtttaaatctaagggattgaaaatggagtagagtataaagtgtgaatgcatgttgattttgtcttagtctagaaatctctagtttagaaaggatgtttaggggaacatgaggctggctctgcagcaacaaccaggctcccctgcatccctgggcccagggagtttactcagagctctctgaagatgtggcaacccatgcccccttttctgaggaggtgcatggcctgagcattgtttgtctggcccagaggagagagcttgggttcccatagtcctgggagagtgtctgcagggcggcggagggcagagcagggcaggggagggcacagcaggccctgcgaagggcagagcggggcaggggagggcagagcaggccctgcggagagctcactctggtcgactcttcctctcagagaatgttgctctggaggctgctctgcatgaaaaccctaatggtttcttgtttgtttttcaaattatttagaaataagttctccggatgggctgttgtgataccacttaaaatctctagagaactactgaacacctaaagattttctgtagcgtagatatttccccagaggcacgcgaactgtcagtctttcctaaggcccccgggagacgcaggcaatggggcctcgcaggccaggcttgcaccagcatgtcttgagttagaggacttaaaattatccagtttcttctgtgtttctacttgaattgtggaaaagctctattatccaattaacttctccataattattgttgtaatattattattgtttgtaaaacatggttcacataactagcttgtggaaaccagcaggtaaaatgaattcttaagttgacgcttttggttctgttgtaaagcaaagatgaataaaaatttccaatgtcttcaa

SEQ ID NO: 76 - protein, 508 aa, Homo sapiens
MEEGPLPGGLPSPEDAMVTELLSPEGPFASENIGLKAPVKYEEDEFHVFKEAYLGPADPKEPVLHAFNPALGADCKGQVKAKLAGGDSDGGELLGEYPGIPELSALEDVALLQAPQPPACNVHFLSSLLPAHRSPAVLPLGAWVLEGASHPGVRMIPVEIKEAGGTTTSNNPEEATLQNLLAQESCCKFPSSQELEDASCCSLKKDSNPMVICQLKGGTQMLCIDNSRTRELKALHLVPQYQDQNNYLQSDVPKPMTALVGRFLPASTKLNLITQQLEGALPSVVNGSAFPSGSTLPGPPKITLAGYCDCFASGDFCNNCNCNNCCNNLHHDIERFKAIKACLGRNPEAFQPKIGKGQLGNVKPQHNKGCNCRRSGCLKNYCECYEAQIMCSSICKCIGCKNYEESPERKTLMSMPNYMQTGGLEGSHYLPPTKFSGLPRFSHDRRPSSCISWEVVEATCACLLAQGEEAEKEHCSKCLAEQMILEEFGRCLSQILHTEFKSKGLKME

SEQ ID NO: 77 - DNA, 2785 bp, Homo sapiens
  CDS (266)..(2368)
actcaggcccctcccccggcgcccgcgcgccaggactgggcggcgccgacgcgcttggcgggagatagaaaagtgcttcaacccgcgccggcggcgactgcagttcctgcgagcgaggagcgcgggacctgctgacacgctgacgccttcgagcgcggcccggggcccggagcggccggagcagcccgggtcctgaccccggcccggctcccgctccgggctctgccggcgggcgggcgagcgcggcgcggtccgggccggggggatgtctcggcggacgcgctgcgaggatctggatgagctgcactaccaggacacagattcagatgtgccggagcagagggatagcaagtgcaaggtcaaatggacccatgaggaggacgagcagctgagggccctggtgaggcagtttggacagcaggactggaagttcctggccagccacttccctaaccgcactgaccagcaatgccagtacaggtggctgagagttttgaatccagaccttgtcaaggggccatggaccaaagaggaagaccaaaaagtcatcgagctggttaagaagtatggcacaaagcagtggacactgattgccaagcacctgaagggccggctggggaagcagtgccgtgaacgctggcacaaccacctcaaccctgaggtgaagaagtcttgctggaccgaggaggaggaccgcatcatctgcgaggcccacaaggtgctgggcaaccgctgggccgagatcgccaagatgttgccagggaggacagacaatgctgtgaagaatcactggaactctaccatcaaaaggaaggtggacacaggaggcttcttgagcgagtccaaagactgcaagcccccagtgtacttgctgctggagctcgaggacaaggacggcctccagagtgcccagcccacggaaggccagggaagtcttctgaccaactggccctccgtccctcctaccataaaggaggaggaaaacagtgaggaggaacttgcagcagccaccacatcgaaggaacaggagcccatcggtacagatctggacgcagtgcgaacaccagagcccttggaggaattcccgaagcgtgaggaccaggaaggctccccaccagaaacgagcctgccttacaagtgggtggtggaggcagctaacctcctcatccctgctgtgggttctagcctctctgaagccctggacttgatcgagtcggaccctgatgcttggtgtgacctgagtaaatttgacctccctgaggaaccatctgcagaggacagtatcaacaacagcctagtgcagctgcaagcgtcacatcagcagcaagtcctgccaccccgccagccttccgccctggtgcccagtgtgaccgagtaccgcctggatggccacaccatctcagacctgagccggagcagccggggcgagctgatccccatctcccccagcactgaagtcgggggctctggcattggcacaccgccctctgtgctcaagcggcagaggaagaggcgtgtggctctgtcccctgtcactgagaatagcaccagtctgtccttcctggattcctgtaacagcctcacgcccaagagcacacctgttaagaccctgcccttctcgccctcccagtttctgaacttctggaacaaacaggacacattggagctggagagcccctcgctgacatccaccccagtgtgcagccagaaggtggtggtcaccacaccactgcaccgggacaagacacccctgcaccagaaacatgctgcgtttgtaaccccagatcagaagtactccatggacaacactccccacacgccaaccccgttcaagaacgccctggagaagtacggacccctgaagcccctgccacagaccccgcacctggaggaggacttgaaggaggtgctgcgttctgaggctggcatcgaactcatcatcgaggacgacatcaggcccgagaagcagaagaggaagcctgggctgcggcggagccccatcaagaaagtccggaagtctctggctcttgacattgtggatgaggatgtgaagctgatgatgtccacactgcccaagtctctatccttgccgacaactgccccttcaaactcttccagcctcaccctgtcaggtatcaaagaagacaacagcttgctcaaccagggcttcttgcaggccaagcccgagaaggcagcagtggcccagaagccccgaagccacttcacgacacctgcccctatgtccagtgcctggaagacggtggcctgcggggggaccagggaccagcttttcatgcaggagaaagcccggcagctcctgggccgcctgaagcccagccacacatctcggaccctcatcttgtcctgaggtgttgagggtgtcacgagcccattctcatgtttacaggggttgtgggggcagagggggtctgtgaatctgagagtcattcaggtgacctcctgcagggagccttctgccaccagcccctccccagactctcaggtggaggcaacagggccatgtgctgccctgttgccgagcccagctgtgggcggctcctggtgctaacaacaaagttccacttccaggtctgcctggttccctccccaaggccacagggagctccgtcagcttctcccaagcccacgtcaggcctggcctcatctcagaccctgcttaggatgggggatgtggccaggggtgctcctgtgctcaccctctcttggtgcatttttttggaagaataaaattgcctctctctttgtgctggtctggaaaaaaaaa

SEQ ID NO: 78 - protein, 700 aa, Homo sapiens
MSRRTRCEDLDELHYQDTDSDVPEQRDSKCKVKWTHEEDEQLRALVRQFGQQDWKFLASHFPNRTDQQCQYRWLRVLNPDLVKGPWTKEEDQKVIELVKKYGTKQWTLIAKHLKGRLGKQCRERWHNHLNPEVKKSCWTEEEDRIICEAHKVLGNRWAEIAKMLPGRTDNAVKNHWNSTIKRKVDTGGFLSESKDCKPPVYLLLELEDKDGLQSAQPTEGQGSLLTNWPSVPPTIKEEENSEEELAAATTSKEQEPIGTDLDAVRTPEPLEEFPKREDQEGSPPETSLPYKWVVEAANLLIPAVGSSLSEALDLIESDPDAWCDLSKFDLPEEPSAEDSINNSLVQLQASHQQQVLPPRQPSALVPSVTEYRLDGHTISDLSRSSRGELIPISPSTEVGGSGIGTPPSVLKRQRKRRVALSPVTENSTSLSFLDSCNSLTPKSTPVKTLPFSPSQFLNFWNKQDTLELESPSLTSTPVCSQKVVVTTPLHRDKTPLHQKHAAFVTPDQKYSMDNTPHTPTPFKNALEKYGPLKPLPQTPHLEEDLKEVLRSEAGIELIIEDDIRPEKQKRKPGLRRSPIKKVRKSLALDIVDEDVKLMMSTLPKSLSLPTTAPSNSSSLTLSGIKEDNSLLNQGFLQAKPEKAAVAQKPRSHFTTPAPMSSAWKTVACGGTRDQLFMQEKARQLLGRLKPSHTSRTLILS

SEQ ID NO: 79 - DNA, 7591 bp, Homo sapiens
  CDS (159)..(6323)
tccatccctgaccgggccgaggctgctggatgccgcgtctccgcttctgctgcctgccgggcgggctccggtggccgcagcaaagtggggcaccaaggccctgtgctaagcactcataatcctctgggggtgctacccctacaaacagcacccccaccatgtttaacctaatgaagaaagacaaggacaaagatggcgggcggaaggagaagaaggagaaaaaggagaaaaaggagcggatgtcagcggcagagcttcggagcctggaggagatgagcctgcgacgtggcttcttcaacctgaaccgctcctccaagcgtgaatccaagacgcgcctggaaatctccaaccccatccccatcaaggtggccagcggctctgacctgcacctgactgacattgactccgatagtaaccggggcagcgtcatcctggactcgggccacctaagtacagccagctccagcgatgacctcaagggtgaggagggtagcttccgtggctcggtgctgcagcgggcagccaagttcggctcactggccaagcagaactcacagatgattgtcaagcgcttttccttctcccagcgtagccgggatgagagcgcctcagaaacctcgacgccctcagagcactctgccgccccctcgccacaggtggaggtgaggactctagagggacagctggtgcagcatcctggcccaggcatccctcgaccagggcaccgatcccgagcccctgagctagtgactaaaaagttcccagtcgacctgcgcctgccccccgtggtgcccctgcccccacctaccctccgggagctggagctgcaacgacggcccactggagactttggcttctccctgcggcgcacaaccatgctggatcggggccccgagggccaggcctgtcggcgtgtggtccactttgctgagcctggtgcaggcaccaaggacctggccctggggctggtgccaggagatcgactggtggagattaatgggcacaatgtggagagcaagtccagggatgagattgtggagatgatccggcagtcaggggacagcgtgcggctcaaggtgcagcccattccagagctcagcgagctcagcaggagctggctgcggagcggcgagggacctcgcagggagccatccgatgcgaaaacagaagaacagattgcagcagaagaggcctggaatgagacggagaaggtgtggctggtccatagggacggcttctcactggccagtcaactcaaatctgaggagctcaacttgcctgaggggaaggtgcgtgtgaagctggaccacgatggggccatcctggatgtggatgaggatgacgttgagaaggctaatgctccctcctgcgaccgtctggaggatctggcctcactggtgtacctcaatgagtccagcgtcctgcacaccttgcgccagcgctatggcgctagcctgctgcacacgtatgctggccccagcctgctggttcttggcccccgtggggcccctgctgtgtactctgagaaggtgatgcacatgttcaagggttgtcggcgggaggacatggcaccccacatctatgcagtggcccagaccgcatacagggcgatgctgatgagccgtcaggatcagtcaatcatcctcctgggcagtagtggcagtggcaagaccaccagctgccagcatctggtgcagtacctggccaccatcgcgggcatcagcgggaacaaggtgttttctgtggagaagtggcaggctctgtacaccctcctggaagcctttgggaacagccccaccatcattaatggcaatgccacccgcttctcccagatcctctccctggactttgaccaagctggccaggtggcctcagcctccattcagacaatgcttctggagaagctgcgtgtggctcggcgcccagccagtgaagccacattcaacgtcttctactacctgctggcctgtggggatggcaccctcaggacagagctccacctcaaccacttggcagagaacaatgtgtttgggattgtgccactggccaagcctgaggaaaagcagaaggcagctcagcagtttagtaagctgcaggcggccatgaaggtgctgggcatctcccccgatgaacagaaggcctgctggttcattctggctgccatctaccacctgggggctgcgggagccaccaaagaagctgctgaagctgggcgcaagcagtttgcccgccatgagtgggcccagaaggctgcgtacctactgggctgcagcctggaggagctgtcctcagccatcttcaagcaccagcacaagggtggcaccctgcagcgctccacctccttccgccagggccccgaggagagtggcctgggagatgggacaggcccgaaactgagtgcactggagtgccttgagggcatggcggccggcctctacagcgagctcttcacccttctcgtctccctggtgaatagggctctcaagtccagccagcactcactctgctccatgatgattgtcgacaccccgggcttccagaaccctgagcagggtgggtcagcccgcggagcctcctttgaggagctgtgccacaactacacccaagaccggctgcagaggctcttccacgagcgcaccttcgtgcaggagttggaaagatacaaggaggagaacatcgagctggcgtttgacgacttggaacccccgacggatgactctgtggctgctgtggaccaggcctcccatcagtccctggtccgctcgctggcccgcacagacgaggcgaggggcctgctctggctattggaagaggaggctctggtgccaggggccagtgaggacaccctcctggagcgccttttctcctattatggcccccaggaaggtgacaaaaaaggccaaagcccccttctgcacagcagcaaaccacaccactttctcctgggccacagccatggcaccaactgggtagagtacaatgtgactggctggctgaactacaccaagcagaacccagccacccagaatgccccccggctcctgcaggactcccagaaaaaaatcatcagcaacctgtttctgggccgcgcaggcagtgccacggtgctctctggctccatcgcgggcctggagggcggctcgcagctggcactgcgccgggccaccagcatgcggaaaacctttaccacaggcatggcggctgtcaaaaagaagtcactgtgcatccagatgaagctacaggtggacgccctcatcgacaccatcaagaagtcaaagctgcattttgtgcactgcttcctgcctgtagctgagggctgggctggggagccccgttccgcctcctcccgccgagtcagcagcagcagtgagctggacctgccctcgggagaccactgcgaggctgggctcctgcagctcgacgtgcccctgctccgcacccagctccgcggctcccgcctgctcgatgccatgcgcatgtaccgccaaggttaccctgaccacatggtgttttccgagttccgccgccgctttgatgtcctggccccgcacctgaccaagaaacacgggcgtaactacatcgtggtggatgaaaggcgggcagtggaggagctgctggagtgcttggatctggagaagagcagctgctgcatgggcctgagccgggtgttcttccgggcgggcaccttggcacggctggaggagcagcgggatgaacaaaccagcaggaacctaaccctgttccaagcagcctgcaggggctacctggcccgccagcacttcaagaagagaaagatccaggacctggccattcgctgtgtacagaagaacatcaagaagaacaaaggggtgaaggactggccctggtggaagctttttaccacagtgaggcccctcatcgaagtacagctgtcagaggagcagatccggaacaaagacgaggagatccagcagctgcggagcaagctcgagaaggcggagaaggagaggaacgagctgcggctcaacagtgaccggctggagagccggatctcagagctgacatcggagctgacagatgagcgtaacacaggagagtccgcctcccagctgctggacgcggagacagcagagaggctccgggctgagaaggagatgaaggaactgcagacccagtacgatgcactgaagaagcagatggaggttatggaaatggaggtgatggaggcccgtctcatccgggcagcggagatcaacggggaagtggatgatgatgatgcaggtggcgagtggcggctgaagtatgagcgggctgtgcgggaggtggacttcaccaagaaacggctccagcaggagtttgaggacaagctggaggtggagcagcagaacaagaggcagctggaacggcggctcggggacctgcaggcagatagtgaggagagtcagcgggctctgcagcagctcaagaagaagtgccagcgactgacggctgagctgcaagacaccaagctgcacctggagggccagcaggtccgcaaccacgaactggagaagaagcagaggaggtttgacagtgagctctcgcaggcgcatgaggaggcccagcgggagaagctgcagcgggagaagctgcagcgggagaaggacatgctcctcgctgaggctttcagcctgaagcagcaactagaggaaaaagacatggacattgcagggttcacccagaaggttgtgtctctagaggcagagctccaggacatttcttcccaagagtccaaggatgaggcttctctggccaaggtcaagaaacagctccgggacctggaggccaaagtcaaggatcaggaagaagagctggatgagcaggcagggaccatccagatgctggaacaggccaagctgcgtctggagatggagatggagcggatgagacagacccattctaaggagatggagagtcgggatgaggaggtggaggaggcccggcagtcgtgtcagaagaagttaaaacagatggaggtgcagctagaggaagagtatgaggacaagcagaaggttctgcgagagaagcgggagctggagggcaagctcgccaccctcagcgaccaggtgaaccggcgggactttgagtcagagaagcggctgcggaaggacctgaagcgcaccaaggccctgctggcagatgcccagctcatgctggaccacctgaagaacagtgctcccagcaagcgagagattgcccagctcaagaaccagctggaggagtcagagttcacctgtgcggcagccgtgaaagcacggaaagcaatggaggtggagatcgaagacctgcacctgcagattgatgacatcgccaaagccaagacagcgctggaggagcagctgagccgccttcagcgtgagaagaatgagatccagaaccggctggaggaagatcaggaagacatgaacgaattgatgaagaagcacaaggctgccgtggctcaggcttcccgggacctggctcagataaatgatctccaagctcagctagaagaagccaacaaagagaagcaggagctgcaggagaagctacaagccctccagagccaggtggagttcctggagcagtccatggtggacaagtccctggtgagcaggcaggaagctaagatacgggagctggagacacgcctggagtttgaaaggacgcaagtgaaacggctggagagcctggctagccgtctcaaggaaaacatggagaagctgactgaggagcgggatcagcgcattgcagccgagaaccgggagaaggaacagaacaagcggctacagaggcagctccgggacaccaaggaggagatgggcgagcttgccaggaaggaggccgaggcgagccgcaagaagcacgaactggagatggatctagaaagcctggaggctgctaaccagagcctgcaggctgacctaaagttggcattcaagcgcatcggggacctgcaggctgccattgaggatgagatggagagtgatgagaatgaggacctcatcaacagtttgcaggacatggtgacaaagtatcagaaaagaaagaataaacttgagggagactctgatgtggactcggagctggaggaccgtgttgacggggtcaagtcctggttgtcaaaaaacaagggaccttccaaggcagcttctgatgatggcagcttaaagagttccagccccaccagctactggaagtcccttgcccctgatcggtcagatgatgagcacgaccctctcgacaacacctccagaccgcgatactcccacagttatctgagtgacagcgacacagaggccaagctgacggagactaacgcatagcccaggggagtggttggcagccctctcaccccagggcctgtggctgcctgggcacctctcccaggaagtggtggggcaccggtctcccccacccgactgctgatctgcatgggaaacaccctgaccttcttctgtcaggggcactttccaggctatgggtgtctgatgtctccacgtggaagaggtgggggaaagaggagtttctgaagagaactttttgctcctctgtctcaaaatgccagactcttggcttctaccctgtgtcaccgtgggcagtggcaggtggcctggcactgcatggagccagcacgttgacctccctctcagctccctgctcagggacggtggacaggttgcctactgggacactctaggttgctgggtccatggggaggattgggggaggagaagcagtgccttccctctcgtgtggggtgggggctctctcttcttggtgcctgctgtctttctactttttaatttaaatacccaacctctccatcacagctgcatccctgagagtgggagggggctgtagtggtagctggggctcccaagaacgactcgggaatgtcatctccatcttcacccttcagagagcagtcctttctctgtgcagctggagacgctggtgaggagagccgggtccaggttcttaagaatgaggtgcggaggggctctccggtgctgctgggctgggttgagcaagcctacgcagacaagtgtgtgtgtggaccatccgcacctccagcccccaccccaccctctttgtctcagcgtgttatgtgcaatgacctatttaaggtaaacccattccaactacagcagttcagggctgatccaagcactgcctccctcctgctctgtccaggtggtctggaccataaactcaacttgagagggaaggcttggggttgaggacttgtgatcagaaaaactgaagatggaagttttggccggtgctcattagacatgagtcctcactctgtgtcctgagcccgtgtcattcttccaacctccctgcccccacacacttatcccagacacaacaccatgtggtctggaggtcccagcccccaccctaaaaaggttatccctgagaactccaccagacttgggagcccaagtgcagtgcctggtgctgctcccatctgccgccccccttctctcctgcaattggtttgtactcactgggctgtgctctcccctgtttacccgatgtatggaaataaaggcccttttcctcctggctgcgccagtaaaaaaaa

SEQ ID NO: 80 - protein, 2054 aa, Homo sapiens
MFNLMKKDKDKDGGRKEKKEKKEKKERMSAAELRSLEEMSLRRGFFNLNRSSKRESKTRLEISNPIPIKVASGSDLHLTDIDSDSNRGSVILDSGHLSTASSSDDLKGEEGSFRGSVLQRAAKFGSLAKQNSQMIVKRFSFSQRSRDESASETSTPSEHSAAPSPQVEVRTLEGQLVQHPGPGIPRPGHRSRAPELVTKKFPVDLRLPPVVPLPPPTLRELELQRRPTGDFGFSLRRTTMLDRGPEGQACRRVVHFAEPGAGTKDLALGLVPGDRLVEINGHNVESKSRDEIVEMIRQSGDSVRLKVQPIPELSELSRSWLRSGEGPRREPSDAKTEEQIAAEEAWNETEKVWLVHRDGFSLASQLKSEELNLPEGKVRVKLDHDGAILDVDEDDVEKANAPSCDRLEDLASLVYLNESSVLHTLRQRYGASLLHTYAGPSLLVLGPRGAPAVYSEKVMHMFKGCRREDMAPHIYAVAQTAYRAMLMSRQDQSIILLGSSGSGKTTSCQHLVQYLATIAGISGNKVFSVEKWQALYTLLEAFGNSPTIINGNATRFSQILSLDFDQAGQVASASIQTMLLEKLRVARRPASEATFNVFYYLLACGDGTLRTELHLNHLAENNVFGIVPLAKPEEKQKAAQQFSKLQAAMKVLGISPDEQKACWFILAAIYHLGAAGATKEAAEAGRKQFARHEWAQKAAYLLGCSLEELSSAIFKHQHKGGTLQRSTSFRQGPEESGLGDGTGPKLSALECLEGMAAGLYSELFTLLVSLVNRALKSSQHSLCSMMIVDTPGFQNPEQGGSARGASFEELCHNYTQDRLQRLFHERTFVQELERYKEENIELAFDDLEPPTDDSVAAVDQASHQSLVRSLARTDEARGLLWLLEEEALVPGASEDTLLERLFSYYGPQEGDKKGQSPLLHSSKPHHFLLGHSHGTNWVEYNVTGWLNYTKQNPATQNAPRLLQDSQKKIISNLFLGRAGSATVLSGSIAGLEGGSQLALRRATSMRKTFTTGMAAVKKKSLCIQMKLQVDALIDTIKKSKLHFVHCFLPVAEGWAGEPRSASSRRVSSSSELDLPSGDHCEAGLLQLDVPLLRTQLRGSRLLDAMRMYRQGYPDHMVFSEFRRRFDVLAPHLTKKHGRNYIVVDERRAVEELLECLDLEKSSCCMGLSRVFFRAGTLARLEEQRDEQTSRNLTLFQAACRGYLARQHFKKRKIQDLAIRCVQKNIKKNKGVKDWPWWKLFTTVRPLIEVQLSEEQIRNKDEEIQQLRSKLEKAEKERNELRLNSDRLESRISELTSELTDERNTGESASQLLDAETAERLRAEKEMKELQTQYDALKKQMEVMEMEVMEARLIRAAEINGEVDDDDAGGEWRLKYERAVREVDFTKKRLQQEFEDKLEVEQQNKRQLERRLGDLQADSEESQRALQQLKKKCQRLTAELQDTKLHLEGQQVRNHELEKKQRRFDSELSQAHEEAQREKLQREKLQREKDMLLAEAFSLKQQLEEKDMDIAGFTQKVVSLEAELQDISSQESKDEASLAKVKKQLRDLEAKVKDQEEELDEQAGTIQMLEQAKLRLEMEMERMRQTHSKEMESRDEEVEEARQSCQKKLKQMEVQLEEEYEDKQKVLREKRELEGKLATLSDQVNRRDFESEKRLRKDLKRTKALLADAQLMLDHLKNSAPSKREIAQLKNQLEESEFTCAAAVKARKAMEVEIEDLHLQIDDIAKAKTALEEQLSRLQREKNEIQNRLEEDQEDMNELMKKHKAAVAQASRDLAQINDLQAQLEEANKEKQELQEKLQALQSQVEFLEQSMVDKSLVSRQEAKIRELETRLEFERTQVKRLESLASRLKENMEKLTEERDQRIAAENREKEQNKRLQRQLRDTKEEMGELARKEAEASRKKHELEMDLESLEAANQSLQADLKLAFKRIGDLQAAIEDEMESDENEDLINSLQDMVTKYQKRKNKLEGDSDVDSELEDRVDGVKSWLSKNKGPSKAASDDGSLKSSSPTSYWKSLAPDRSDDEHDPLDNTSRPRYSHSYLSDSDTEAKLTETNA

What is claimed is:

1. A cell death-inducing agent for inducing death of a cancer cell, the agent comprising, as active ingredients, a drug inhibiting GST-π and a drug inhibiting a homeostasis-related protein that exhibits synthetic lethality when inhibited together with GST-π.

2. A cell growth-inhibiting agent for inhibiting growth of cancer cells, the agent comprising, as active ingredients, a drug inhibiting GST-π and a drug inhibiting a homeostasis-related protein that exhibits synthetic lethality when inhibited together with GST-π.

3. The agent according to claim 1, wherein the homeostasis-related protein that exhibits synthetic lethality along with the inhibition of GST-π is a cell cycle-regulating protein or an anti-apoptosis-related protein.

4. The agent according to claim 3, wherein the cell cycle-regulating protein that exhibits synthetic lethality along with the inhibition of GST-π is at least one cell cycle-regulating protein selected from the group consisting of ATM, CDC25A, p21, PRKDC, RBBP8, SKP2, MCM10, RNPC1, CCNL1, CENPH, BRSK1, MCM8, CCNB3, and MCMDC1.

5. The agent according to claim 3, wherein the cell cycle-regulating protein that exhibits synthetic lethality along with the inhibition of GST-π is at least one protein selected from the group consisting of p21, RNPC1, CCNL1, MCM8, CCNB3, and MCMDC1.

6. The agent according to claim 3, wherein the anti-apoptosis-related protein that exhibits synthetic lethality along with the inhibition of GST-π is at least one anti-apoptosis-related protein selected from the group consisting of AATF, AKT1, ALOX12, ANXA1, ANXA4, API5, ATF5, AVEN, AZU1, BAG1, BCL2L1, BFAR, CFLAR, IL2, MALT1, MCL1, MKL1, MPO, MTL5, MYBL2, and MYO18A.

7. The agent according to claim 1, wherein the drug inhibiting GST-π and the drug inhibiting a homeostasis-related protein are each a substance selected from the group consisting of an RNAi molecule, a ribozyme, an antisense nucleic acid, a DNA/RNA chimeric polynucleotide, and a vector for expressing at least one of them.

8. The agent according to claim 1, wherein the drug inhibiting a homeostasis-related protein is a compound that acts on the homeostasis-related protein.

9. The agent according to claim 1, wherein the agent induces apoptosis.

10. The agent according to claim 1, wherein the cancer cell is a cancer cell highly expressing GST-π.

11. A pharmaceutical composition for the treatment of a disease caused by abnormal cell growth, comprising an agent according to claim 1.

12. The pharmaceutical composition according to claim 11, wherein the disease is a cancer.

13. The pharmaceutical composition according to claim 12, wherein the cancer is a cancer highly expressing GST-π.

14. A method for screening for a cell death-inducing agent and/or a cell growth-inhibiting agent for a cancer cell that is used together with a drug inhibiting GST-π, comprising a step of selecting a drug inhibiting a homeostasis-related protein that exhibits synthetic lethality when inhibited together with GST-π.

15. The screening method according to claim 14, comprising the steps of: contacting a test substance with a cancer cell; measuring the expression level of the homeostasis-related protein in the cell; and selecting the test substance as a drug inhibiting the homeostasis-related protein when the expression level is decreased compared with that measured in the absence of the test substance.

16. The screening method according to claim 14, wherein the homeostasis-related protein that exhibits synthetic lethality along with the inhibition of GST-π is a cell cycle-regulating protein or an anti-apoptosis-related protein.

17. The screening method according to claim 16, wherein the cell cycle-regulating protein that exhibits synthetic lethality along with the inhibition of GST-π is at least one cell cycle-regulating protein selected from the group consisting of ATM, CDC25A, p21, PRKDC, RBBP8, SKP2, MCM10, RNPC1, CCNL1, CENPH, BRSK1, MCM8, CCNB3, and MCMDC1.

18. The screening method according to claim 16, wherein the cell cycle-regulating protein that exhibits synthetic lethality along with the inhibition of GST-π is at least one protein selected from the group consisting of p21, RNPC1, CCNL1, MCM8, CCNB3, and MCMDC1.

19. The screening method according to claim 16, wherein the anti-apoptosis-related protein that exhibits synthetic lethality along with the inhibition of GST-π is at least one anti-apoptosis-related protein selected from the group consisting of AATF, AKT1, ALOX12, ANXA1, ANXA4, API5, ATF5, AVEN, AZU1, BAG1, BCL2L1, BFAR, CFLAR, IL2, MALT1, MCL1, MKL1, MPO, MTL5, MYBL2, and MYO18A.
